(19) United States
(12) Patent Application Publication
(10) Pub. No.: US 2009/0299045 A1
(43) Pub. Date: Dec. 3, 2009

(54) RNA Interference Mediated Inhibition Of Interleukin and Interleukin Gene Expression Using Short Interfering Nucleic Acid (siNA)

(75) Inventors: Ivan Richards, Kalamazoo, MI (US); Barry Polisky, Boulder, CO (US); James McSwiggen, Boulder, CO (US)

Correspondence Address: Sirna Therapeutics, Inc., 1700 Owens Street, 4th Floor, San Francisco, CA, 94158, US

(73) Assignee: SIRNA THERAPEUTICS, INC., San Francisco, CA (US)

(21) Appl. No.: 11/756,240

(22) Filed: May 31, 2007

Related U.S. Application Data
(63) Continuation-in-part of application No. 11/001,347, filed on Dec. 1, 2004, now abandoned.
Application No. 11/001,347 is a continuation-in-part of application No. 10/922,675, filed on Aug. 20, 2004, now abandoned.
Application No. 10/922,675 is a continuation-in-part of application No. 10/863,973, filed on Jun. 9, 2004, now abandoned.
Application No. 10/863,973 is a continuation-in-part of application No. PCT/US03/04566, filed on Feb. 14, 2003.
Application No. PCT/US03/04566 is a continuation-in-part of application No. PCT/US04/16390, filed on May 24, 2004.
Application No. PCT/US04/16390 is a continuation-in-part of application No. 10/826,966, filed on Apr. 16, 2004, now abandoned.
Application No. 10/826,966 is a continuation-in-part of application No. 10/757,803, filed on Jan. 14, 2004.
Application No. 10/757,803 is a continuation-in-part of application No. 10/720,448, filed on Nov. 24, 2003.
Application No. 10/720,448 is a continuation-in-part of application No. 10/693,059, filed on Oct. 23, 2003.
Application No. 10/693,059 is a continuation-in-part of application No. 10/444,853, filed on May 23, 2003.
Application No. 10/444,853 is a continuation-in-part of application No. PCT/US03/05346, filed on Feb. 20, 2003.
Application No. PCT/US03/05346 is a continuation-in-part of application No. PCT/US03/05028, filed on Feb. 20, 2003.
Application No. 11/001,347 is a continuation-in-part of application No. PCT/US04/13456, filed on Apr. 30, 2004.
Application No. PCT/US04/13456 is a continuation-in-part of application No. 10/780,447, filed on Feb. 13, 2004, now Pat. No. 7,491,805.
Application No. 10/780,447 is a continuation-in-part of application No. 10/427,160, filed on Apr. 30, 2003.
Application No. 10/427,160 is a continuation-in-part of application No. PCT/US02/15876, filed on May 17, 2002.
Application No. PCT/US02/15876 is a continuation-in-part of application No. 10/727,780, filed on Dec. 3, 2003, now abandoned.
(60) Provisional application No. 60/358,580, filed on Feb. 20, 2002.
(60) Provisional application No. 60/358,580, filed on Feb. 20, 2002.
(60) Provisional application No. 60/363,124, filed on Mar. 11, 2002.
(60) Provisional application No. 60/363,124, filed on Mar. 11, 2002.
(60) Provisional application No. 60/386,782, filed on Jun. 6, 2002.
(60) Provisional application No. 60/386,782, filed on Jun. 6, 2002.
(60) Provisional application No. 60/406,784, filed on Aug. 29, 2002.
(60) Provisional application No. 60/406,784, filed on Aug. 29, 2002.
(60) Provisional application No. 60/408,378, filed on Sep. 5, 2002.
(60) Provisional application No. 60/408,378, filed on Sep. 5, 2002.
(60) Provisional application No. 60/409,293, filed on Sep. 9, 2002.
(60) Provisional application No. 60/409,293, filed on Sep. 9, 2002.
(60) Provisional application No. 60/440,129, filed on Jan. 15, 2003.
(60) Provisional application No. 60/440,129, filed on Jan. 15, 2003.
(60) Provisional application No. 60/292,217, filed on May 18, 2001.
(60) Provisional application No. 60/362,016, filed on Mar. 6, 2002.
(60) Provisional application No. 60/306,883, filed on Jul. 20, 2001.
(60) Provisional application No. 60/311,865, filed on Aug. 13, 2001.

(51) Int. Cl. C07H 21/02

(52) U.S. Cl. 536/24.5

(57) ABSTRACT

This invention relates to compounds, compositions, and methods useful for modulating interleukin and/or interleukin receptor gene expression using short interfering nucleic acid (siNA) molecules. This invention also relates to compounds, compositions, and methods useful for modulating the expression and activity of other genes involved in pathways of interleukin and/or interleukin receptor gene expression and/or activity by RNA interference (RNAi) using small nucleic acid molecules. In particular, the instant invention features small nucleic acid molecules, such as short interfering nucleic acid (siNA), short interfering RNA (siRNA), double-stranded RNA (dsRNA), micro-RNA (miRNA), and short hairpin RNA (shRNA) molecules and methods used to modulate the expression of interleukin and/or interleukin receptor genes, such as IL-1, IL-2, IL-3, IL-4, IL-5, IL-6, IL-7, IL-8, IL-9, IL-10, IL-11, IL-12, IL-13, IL-14, IL-15, IL-16, IL-17, IL-18, IL-19, IL-20, IL-21, IL-22, IL-23, IL-24, IL-25, IL-26, and IL-27 genes and IL-1R, IL-2R, IL-3R, IL-4R, IL-5R, IL-6R, IL-7R, IL8R, IL-9R, IL-10R, IL-11R, IL-12R, IL-13R, IL-14R, IL-15R, IL-16R, IL-17R, IL-18R, IL19R, IL-20R, IL-21R, IL-22R, IL-23R, IL-24R, IL-25R, IL-26R, and IL-27R. Such small nucleic acid molecules are useful, for example, for treating, preventing, inhibiting, or reducing cancer, inflammatory, respiratory, autoimmune, cardiovascular, neurological, and/or proliferative diseases, disorders, or conditions in a subject or organism, and for any other disease, trait, or condition that is related to or will respond to the levels of interleukin and/or interleukin receptor in a cell or tissue, alone or in combination with other treatments or therapies.

[0001] This application is a continuation-in-part of U.S. patent application Ser. No. 11/001,347, filed Dec. 1, 2004, which is a continuation-in-part of U.S. patent application Ser. No. 10/922,675, filed Aug. 20, 2004, which is a continuation-in-part of U.S. patent application Ser. No. 10/863,973, filed Jun. 9, 2004, which is a continuation-in-part of International Patent Application No. PCT/US03/04566, filed Feb. 14, 2003. This application is also a continuation-in-part of International Patent Application No. PCT/US04/16390, filed May 24, 2004, which is a continuation-in-part of U.S. patent application Ser. No. 10/826,966, filed Apr. 16, 2004, which is continuation-in-part of U.S. patent application Ser. No. 10/757,803, filed Jan. 14, 2004, which is a continuation-in-part of U.S. patent application Ser. No. 10/720,448, filed Nov. 24, 2003, which is a continuation-in-part of U.S. patent application Ser. No. 10/693,059, filed Oct. 23, 2003, which is a continuation-in-part of U.S. patent application Ser. No. 10/444,853, filed May 23, 2003, which is a continuation-in-part of International Patent Application No. PCT/US03/05346, filed Feb. 20, 2003, and a continuation-in-part of International Patent Application No. PCT/US03/05028, filed Feb. 20, 2003, both of which claim the benefit of U.S. Provisional Application No. 60/358,580 filed Feb. 20, 2002, U.S. Provisional Application No. 60/363,124 filed Mar. 11, 2002, U.S. Provisional Application No. 60/386,782 filed Jun. 6, 2002, U.S. Provisional Application No. 60/406,784 filed Aug. 29, 2002, U.S. Provisional Application No. 60/408,378 filed Sep. 5, 2002, U.S. Provisional Application No. 60/409,293 filed Sep. 9, 2002, and U.S. Provisional Application No. 60/440,129 filed Jan. 15, 2003. This application is also a continuation-in-part of International Patent Application No. PCT/US04/13456, filed Apr. 30, 2004, which is a continuation-in-part of U.S. patent application Ser. No. 10/780,447, filed Feb. 13, 2004, which is a continuation-in-part of U.S. patent application Ser. No. 10/427,160, filed Apr. 30, 2003, which is a continuation-in-part of International Patent Application No. PCT/US02/15876 filed May 17, 2002, which claims the benefit of U.S. Provisional Application No. 60/292,217, filed May 18, 2001, U.S. Provisional Application No. 60/362,016, filed Mar. 6, 2002, U.S. Provisional Application No. 60/306,883, filed Jul. 20, 2001, and U.S. Provisional Application No. 60/311,865, filed Aug. 13, 2001. This application is also a continuation-in-part of U.S. patent application Ser. No. 10/727,780 filed Dec. 3, 2003. This application also claims the benefit of U.S. Provisional Application No. 60/543,480, filed Feb. 10, 2004. The instant application claims the benefit of all the listed applications, which are hereby incorporated by reference herein in their entireties, including the drawings.

### FIELD OF THE INVENTION

[0002] The present invention relates to compounds, compositions, and methods for the study, diagnosis, and treatment of traits, diseases and conditions that respond to the modulation of interleukin (e.g., IL-1, IL-2, IL-3, IL-4, IL-5, IL-6, IL-7, IL-8, IL-9, IL-10, IL-11, IL-12, IL-13, IL-14, IL-15, IL-16, IL-17, IL-18, IL-19, IL-20, IL-21, IL-22, IL-23, IL-24, IL-25, IL-26, and IL-27) and/or interleukin receptors (e.g., IL-1R, IL-2R, IL-3R, IL-4R, IL-5R, IL-6R, IL-7R, IL-8R, IL-9R, IL-10R, IL-11R, IL-12R, IL-13R, IL-14R, IL-15R, IL-16R, IL-17R, IL-18R, IL-19R, IL-20R, IL-21R, IL-22R, IL-23R, IL-24R, IL-25R, IL-26, and IL-27R) gene expression and/or activity. The present invention is also directed to compounds, compositions, and methods relating to traits, diseases and conditions that respond to the modulation of expression and/or activity of genes involved in interleukin and/or interleukin receptor (IL and/or IL-R) gene expression pathways or other cellular processes that mediate the maintenance or development of such traits, diseases and conditions. Specifically, the invention relates to small nucleic acid molecules, such as short interfering nucleic acid (siNA), short interfering RNA (siRNA), double-stranded RNA (dsRNA), micro-RNA (miRNA), and short hairpin RNA (shRNA) molecules capable of mediating or that mediate RNA interference (RNAi) against interleukin and/or interleukin receptor, such as interleukin-4 and/or interleukin-4 receptor or interleukin-13 and/or interleukin-13 receptor gene expression. Such small nucleic acid molecules are useful, for example, in providing compositions for treatment of traits, diseases and conditions that can respond to modulation of interleukin and/or interleukin receptor expression in a subject, such as cancer, inflammatory, respiratory, autoimmune, cardiovascular, neurological, and/or proliferative diseases, disorders, or conditions.

### BACKGROUND OF THE INVENTION

[0003] The following is a discussion of relevant art pertaining to RNAi. The discussion is provided only for understanding of the invention that follows. The summary is not an admission that any of the work described below is prior art to the claimed invention.

[0004] RNA interference refers to the process of sequence-specific post-transcriptional gene silencing in animals mediated by short interfering RNAs (siRNAs) (Zamore et al., 2000, Cell, 101, 25-33; Fire et al., 1998, Nature, 391, 806; Hamilton et al., 1999, Science, 286, 950-951; Lin et al., 1999, Nature, 402, 128-129; Sharp, 1999, Genes & Dev., 13:139-141; and Strauss, 1999, Science, 286, 886). The corresponding process in plants (Heifetz et al., International PCT Publication No. WO 99/61631) is commonly referred to as post-transcriptional gene silencing or RNA silencing and is also referred to as quelling in fingi. The process of post-transcriptional gene silencing is thought to be an evolutionarily-conserved cellular defense mechanism used to prevent the expression of foreign genes and is commonly shared by diverse flora and phyla (Fire et al., 1999, Trends Genet., 15, 358). Such protection from foreign gene expression may have evolved in response to the production of double-stranded RNAs (dsRNAs) derived from viral infection or from the random integration of transposon elements into a host genome via a cellular response that specifically destroys homologous single-stranded RNA or viral genomic RNA. The presence of dsRNA in cells triggers the RNAi response through a mechanism that has yet to be fully characterized. This mechanism appears to be different from other known mechanisms involving double stranded RNA-specific ribonucleases, such as the interferon response that results from dsRNA-mediated activation of protein kinase PKR and 2′,5′-oligoadenylate synthetase resulting in non-specific cleavage of mRNA by ribonuclease L (see for example U.S. Pat. Nos. 6,107,094; 5,898,031; Clemens et al., 1997, J Interferon & Cytokine Res., 17, 503-524; Adah et al., 2001, Curr. Med. Chem., 8, 1189).

[0005] The presence of long dsRNAs in cells stimulates the activity of a ribonuclease III enzyme referred to as dicer (Bass, 2000, Cell, 101, 235; Zamore et al., 2000, Cell, 101, 25-33; Hammond et al., 2000, Nature, 404, 293). Dicer is involved in the processing of the dsRNA into short pieces of dsRNA known as short interfering RNAs (siRNAs) (Zamore et al., 2000, Cell, 101, 25-33; Bass, 2000, Cell, 101, 235; Berstein et al, 2001, Nature, 409, 363). Short interfering RNAs derived from dicer activity are typically about 21 to about 23 nucleotides in length and comprise about 19 base pair duplexes (Zamore et al., 2000, Cell, 101, 25-33; Elbashir et al., 2001, Genes Dev., 15, 188). Dicer has also been implicated in the excision of 21- and 22-nucleotide small temporal RNAs (stRNAs) from precursor RNA of conserved structure that are implicated in translational control (Hutvagner et al., 2001, Science, 293, 834). The RNAi response also features an endonuclease complex, commonly referred to as an RNA-induced silencing complex (RISC), which mediates cleavage of single-stranded RNA having sequence complementary to the antisense strand of the siRNA duplex. Cleavage of the target RNA takes place in the middle of the region complementary to the antisense strand of the siRNA duplex (Elbashir et al., 2001, Genes Dev., 15, 188).

[0006] RNAi has been studied in a variety of systems. Fire et al., 1998, Nature, 391, 806, were the first to observe RNAi in C. elegans. Bahramian and Zarbl, 1999, Molecular and Cellular Biology, 19, 274-283 and Wianny and Goetz, 1999, Nature Cell Biol., 2, 70, describe RNAi mediated by dsRNA in mammalian systems. Hammond et al., 2000, Nature, 404, 293, describe RNAi in Drosophila cells transfected with dsRNA. Elbashir et al., 2001, Nature, 411, 494 and Tuschl et al., International PCT Publication No. WO 01/75164, describe RNAi induced by introduction of duplexes of synthetic 21-nucleotide RNAs in cultured mammalian cells including human embryonic kidney and HeLa cells. Recent work in Drosophila embryonic lysates (Elbashir et al., 2001, EMBO J, 20, 6877 and Tuschl et al., International PCT Publication No. WO 01/75164) has revealed certain requirements for siRNA length, structure, chemical composition, and sequence that are essential to mediate efficient RNAi activity. These studies have shown that 21-nucleotide siRNA duplexes are most active when containing 3′-terminal dinucleotide overhangs. Furthermore, complete substitution of one or both siRNA strands with 2′-deoxy(2′-H) or 2′-O-methyl nucleotides abolishes RNAi activity, whereas substitution of the 3′-terminal siRNA overhang nucleotides with 2′-deoxy nucleotides (2′-H) was shown to be tolerated. Single mismatch sequences in the center of the siRNA duplex were also shown to abolish RNAi activity. In addition, these studies also indicate that the position of the cleavage site in the target RNA is defined by the 5′-end of the siRNA guide sequence rather than the 3′-end of the guide sequence (Elbashir et al, 2001, EMBO J, 20, 6877). Other studies have indicated that a 5′-phosphate on the target-complementary strand of a siRNA duplex is required for siRNA activity and that ATP is utilized to maintain the 5′-phosphate moiety on the siRNA (Nykanen et al., 2001, Cell, 107, 309).

[0007] Studies have shown that replacing the 3′-terminal nucleotide overhanging segments of a 21-mer siRNA duplex having two-nucleotide 3′-overhangs with deoxyribonucleotides does not have an adverse effect on RNAi activity. Replacing up to four nucleotides on each end of the siRNA with deoxyribonucleotides has been reported to be well tolerated, whereas complete substitution with deoxyribonucleotides results in no RNAi activity (Elbashir et al, 2001, EMBO J., 20, 6877 and Tuschl et al., International PCT Publication No. WO 01/75164). In addition, Elbashir et al, supra, also report that substitution of siRNA with 2′-O-methyl nucleotides completely abolishes RNAi activity. Li et al., International PCT Publication No. WO 00/44914, and Beach et al., International PCT Publication No. WO 01/68836 preliminarily suggest that siRNA may include modifications to either the phosphate-sugar backbone or the nucleoside to include at least one of a nitrogen or sulfur heteroatom, however, neither application postulates to what extent such modifications would be tolerated in siRNA molecules, nor provides any further guidance or examples of such modified siRNA. Kreutzer et al., Canadian Patent Application No. 2,359,180, also describe certain chemical modifications for use in dsRNA constructs in order to counteract activation of double-stranded RNA-dependent protein kinase PKR, specifically 2′-amino or 2′-O-methyl nucleotides, and nucleotides containing a 2′-O or 4′-C methylene bridge. However, Kreutzer et al. similarly fails to provide examples or guidance as to what extent these modifications would be tolerated in dsRNA molecules.

[0008] Parrish et al., 2000, Molecular Cell, 6, 1077-1087, tested certain chemical modifications targeting the unc-22 gene in C. elegans using long (>25 nt) siRNA transcripts. The authors describe the introduction of thiophosphate residues into these siRNA transcripts by incorporating thiophosphate nucleotide analogs with T7 and T3 RNA polymerase and observed that RNAs with two phosphorothioate modified bases also had substantial decreases in effectiveness as RNAi. Further, Parrish et al. reported that phosphorothioate modification of more than two residues greatly destabilized the RNAs in vitro such that interference activities could not be assayed. Id. at 1081. The authors also tested certain modifications at the 2′-position of the nucleotide sugar in the long siRNA transcripts and found that substituting deoxynucleotides for ribonucleotides produced a substantial decrease in interference activity, especially in the case of Uridine to Thymidine and/or Cytidine to deoxy-Cytidine substitutions. Id. In addition, the authors tested certain base modifications, including substituting, in sense and antisense strands of the siRNA, 4-thiouracil, 5-bromouracil, 5-iodouracil, and 3-(aminoallyl)uracil for uracil, and inosine for guanosine. Whereas 4-thiouracil and 5-bromouracil substitution appeared to be tolerated, Parrish reported that inosine produced a substantial decrease in interference activity when incorporated in either strand. Parrish also reported that incorporation of 5-iodouracil and 3-(aminoallyl)uracil in the antisense strand resulted in a substantial decrease in RNAi activity as well.

[0009] The use of longer dsRNA has been described. For example, Beach et al., International PCT Publication No. WO 01/68836, describes specific methods for attenuating gene expression using endogenously-derived dsRNA. Tuschl et al., International PCT Publication No. WO 01/75164, describe a Drosophila in vitro RNAi system and the use of specific siRNA molecules for certain functional genomic and certain therapeutic applications; although Tuschl, 2001, Chem. Biochem., 2, 239-245, doubts that RNAi can be used to cure genetic diseases or viral infection due to the danger of activating interferon response. Li et al., International PCT Publication No. WO 00/44914, describe the use of specific long (141 bp-488 bp) enzymatically synthesized or vector expressed dsRNAs for attenuating the expression of certain target genes. Zernicka-Goetz et al., International PCT Publication No. WO 01/36646, describes certain methods for inhibiting the expression of particular genes in mammalian cells using certain long (550 bp-714 bp), enzymatically synthesized or vector expressed dsRNA molecules. Fire et al., International PCT Publication No. WO 99/32619, describe particular methods for introducing certain long dsRNA molecules into cells for use in inhibiting gene expression in nematodes. Plaetinck et al., International PCT Publication No. WO 00/01846, describe certain methods for identifying specific genes responsible for conferring a particular phenotype in a cell using specific long dsRNA molecules. Mello et al., International PCT Publication No. WO 01/29058, describe the identification of specific genes involved in dsRNA-mediated RNAi. Pachuck et al., International PCT Publication No. WO 00/63364, describe certain long (at least 200 nucleotides) dsRNA constructs. Deschamps Depaillette et al., International PCT Publication No. WO 99/07409, describe specific compositions consisting of particular dsRNA molecules combined with certain anti-viral agents. Waterhouse et al., International PCT Publication No. 99/53050 and 1998, PNAS, 95, 13959-13964, describe certain methods for decreasing the phenotypic expression of a nucleic acid in plant cells using certain dsRNAs. Driscoll et al., International PCT Publication No. WO 01/49844, describe specific DNA expression constructs for use in facilitating gene silencing in targeted organisms.

[0010] Others have reported on various RNAi and gene-silencing systems. For example, Parrish et al., 2000, Molecular Cell, 6, 1077-1087, describe specific chemically-modified dsRNA constructs targeting the unc-22 gene of C. elegans. Grossniklaus, International PCT Publication No. WO 01/38551, describes certain methods for regulating polycomb gene expression in plants using certain dsRNAs. Churikov et al., International PCT Publication No. WO 01/42443, describe certain methods for modifying genetic characteristics of an organism using certain dsRNAs. Cogoni et al, International PCT Publication No. WO 01/53475, describe certain methods for isolating a Neurospora silencing gene and uses thereof. Reed et al., International PCT Publication No. WO 01/68836, describe certain methods for gene silencing in plants. Honer et al., International PCT Publication No. WO 01/70944, describe certain methods of drug screening using transgenic nematodes as Parkinson's Disease models using certain dsRNAs. Deak et al., International PCT Publication No. WO 01/72774, describe certain Drosophila-derived gene products that may be related to RNAi in Drosophila. Arndt et al., International PCT Publication No. WO 01/92513 describes certain methods for mediating gene suppression by using factors that enhance RNAi. Tuschl et al., International PCT Publication No. WO 02/44321, describe certain synthetic siRNA constructs. Pachuk et al., International PCT Publication No. WO 00/63364, and Satishchandran et al., International PCT Publication No. WO 01/04313, describe certain methods and compositions for inhibiting the function of certain polynucleotide sequences using certain long (over 250 bp), vector expressed dsRNAs. Echeverri et al., International PCT Publication No. WO 02/38805, describe certain C. elegans genes identified via RNAi. Kreutzer et al., International PCT Publications Nos. WO 02/055692, WO 02/055693, and EP 1144623 B1 describe certain methods for inhibiting gene expression using dsRNA. Graham et al., International PCT Publications Nos. WO 99/49029 and WO 01/70949, and AU 4037501 describe certain vector expressed siRNA molecules. Fire et al., U.S. Pat. No. 6,506,559, describe certain methods for inhibiting gene expression in vitro using certain long dsRNA (299 bp-1033 bp) constructs that mediate RNAi. Martinez et al., 2002, Cell, 110, 563-574, describe certain single stranded siRNA constructs, including certain 5′-phosphorylated single stranded siRNAs that mediate RNA interference in Hela cells. Harborth et al., 2003, Antisense & Nucleic Acid Drug Development, 13, 83-105, describe certain chemically and structurally modified siRNA molecules. Chiu and Rana, 2003, RNA, 9, 1034-1048, describe certain chemically and structurally modified siRNA molecules. Woolf et al., International PCT Publication Nos. WO 03/064626 and WO 03/064625 describe certain chemically modified dsRNA constructs. Hornung et al., 2005, Nature Medicine, 11, 263-270, describe the sequence-specific potent induction of IFN-alpha by short interfering RNA in plasmacytoid dendritic cells through TLR7. Judge et al., 2005, Nature Biotechnology, Published online: 20 Mar. 2005, describe the sequence-dependent stimulation of the mammalian innate immune response by synthetic siRNA. Yuki et al., International PCT Publication Nos. WO 05/049821 and WO 04/048566, describe certain methods for designing short interfering RNA sequences and certain short interfering RNA sequences with optimized activity. Saigo et al., US Patent Application Publication No. US20040539332, describe certain methods of designing oligo- or polynucleotide sequences, including short interfering RNA sequences, for achieving RNA interference. Tei et al., International PCT Publication No. WO 03/044188, describe certain methods for inhibiting expression of a target gene, which comprises transfecting a cell, tissue, or individual organism with a double-stranded polynucleotide comprising DNA and RNA having a substantially identical nucleotide sequence with at least a partial nucleotide sequence of the target gene.

### SUMMARY OF THE INVENTION

[0011] This invention relates to compounds, compositions, and methods useful for modulating interleukins (e.g., IL-1-IL-27) and/or interleukin receptor (e.g., IL-1R-IL-27R) gene expression using short interfering nucleic acid (siNA) molecules. This invention also relates to compounds, compositions, and methods useful for modulating the expression and activity of other genes involved in pathways of interleukin and/or interleukin receptor gene expression and/or activity by RNA interference (RNAi) using small nucleic acid molecules. In particular, the instant invention features small nucleic acid molecules, such as short interfering nucleic acid (siNA), short interfering RNA (siRNA), double-stranded RNA (dsRNA), micro-RNA (miRNA), and short hairpin RNA (shRNA) molecules and methods used to modulate the expression of interleukin and/or interleukin receptor (e.g., IL-1-IL-27 and/or IL-1R-IL-27R) genes.

[0012] A siNA of the invention can be unmodified or chemically-modified. A siNA of the instant invention can be chemically synthesized, expressed from a vector or enzymatically synthesized. The instant invention also features various chemically-modified synthetic short interfering nucleic acid (siNA) molecules capable of modulating interleukin and/or interleukin receptor gene expression or activity in cells by RNA interference (RNAi). The use of chemically-modified siNA improves various properties of native siNA molecules through increased resistance to nuclease degradation in vivo and/or through improved cellular uptake. Further, contrary to earlier published studies, siNA having multiple chemical modifications retains its RNAi activity. The siNA molecules of the instant invention provide useful reagents and methods for a variety of therapeutic, cosmetic, veterinary, diagnostic, target validation, genomic discovery, genetic engineering, and pharmacogenomic applications.

[0013] In one embodiment, the invention features one or more siNA molecules and methods that independently or in combination modulate the expression of interleukin and/or interleukin receptor genes encoding proteins, such as proteins comprising interleukins (e.g., IL-1, IL-2, IL-3, IL-4, IL-5, IL-6, IL-7, IL-8, IL-9, IL-10, IL-11, IL-12, IL-13, IL-14, IL-15, IL-16, IL-17, IL-18, IL-19, IL-20, IL-21, IL-22, IL-23, IL-24, IL-25, IL-26, and IL-27) and/or interleukin receptors (e.g., IL-1R, IL-2R, IL-3R, IL-4R, IL-5R, IL-6R, IL-7R, IL-8R, IL-9R, IL-10R, IL-11R, IL-12R, IL-13R, IL-14R, IL-15R, IL-16R, IL-17R, IL-18R, IL-19R, IL-20R, IL-21R, IL-22R, IL-23R, IL-24R, IL-25R, IL-26, and IL-27R) associated with the maintenance and/or development of cancer, inflammatory, respiratory, autoimmune, cardiovascular, neurological, and/or proliferative diseases, traits, conditions and disorders, such as genes encoding sequences comprising those sequences referred to by GenBank Accession Nos. shown in Table I and U.S. Ser. No. 10/923,536 and U.S. Ser. No. 10/923,536, both incorporated by reference herein referred to herein generally as interleukin and/or interleukin receptor. The description below of the various aspects and embodiments of the invention is provided with reference to exemplary interleukin and/or interleukin receptor genes referred to herein as interleukin and/or interleukin receptor. However, the various aspects and embodiments are also directed to other interleukin and/or interleukin receptor genes, such as homolog genes and transcript variants, and polymorphisms (e.g., single nucleotide polymorphism, (SNPs)) associated with certain interleukin and/or interleukin receptor genes. As such, the various aspects and embodiments are also directed to other genes that are involved in interleukin and/or interleukin receptor mediated pathways of signal transduction or gene expression that are involved, for example, in the maintenance or development of diseases, traits, conditions, or disorders described herein. These additional genes can be analyzed for target sites using the methods described for interleukin and/or interleukin receptor genes herein. Thus, the modulation of other genes and the effects of such modulation of the other genes can be performed, determined, and measured as described herein.

[0014] In one embodiment, the invention features a double stranded nucleic acid molecule, such as a siNA molecule, where one of the strands comprises nucleotide sequence having complementarity to a predetermined interleukin and/or interleukin receptor sequence in a interleukin and/or interleukin receptor target nucleic acid molecule, or a portion thereof. In one embodiment, the predetermined interleukin and/or interleukin receptor nucleotide sequence is a interleukin and/or interleukin receptor nucleotide target sequence described herein. In another embodiment, the predetermined interleukin and/or interleukin receptor sequence is a interleukin and/or interleukin receptor target sequence as is known in the art.

[0015] In one embodiment, the invention features a double-stranded short interfering nucleic acid (siNA) molecule that down-regulates expression of an interleukin and/or interleukin receptor gene, or that directs cleavage of a interleukin and/or interleukin target RNA, wherein said siNA molecule comprises about 15 to about 28 base pairs.

[0016] In one embodiment, the invention features a double stranded short interfering nucleic acid (siNA) molecule that directs cleavage of an interleukin and/or interleukin receptor RNA via RNA interference (RNAi), wherein the double stranded siNA molecule comprises a first and a second strand, each strand of the siNA molecule is about 18 to about 28 nucleotides in length, the first strand of the siNA molecule comprises nucleotide sequence having sufficient complementarity to the interleukin and/or interleukin receptor RNA for the siNA molecule to direct cleavage of the interleukin and/or interleukin receptor RNA via RNA interference, and the second strand of said siNA molecule comprises nucleotide sequence that is complementary to the first strand.

[0017] In one embodiment, the invention features a double stranded short interfering nucleic acid (siNA) molecule that directs cleavage of an interleukin and/or interleukin receptor RNA via RNA interference (RNAi), wherein the double stranded siNA molecule comprises a first and a second strand, each strand of the siNA molecule is about 18 to about 23 nucleotides in length, the first strand of the siNA molecule comprises nucleotide sequence having sufficient complementarity to the interleukin and/or interleukin receptor RNA for the siNA molecule to direct cleavage of the interleukin and/or interleukin receptor RNA via RNA interference, and the second strand of said siNA molecule comprises nucleotide sequence that is complementary to the first strand.

[0018] In one embodiment, the invention features a chemically synthesized double stranded short interfering nucleic acid (siNA) molecule that directs cleavage of an interleukin and/or interleukin receptor RNA via RNA interference (RNAi), wherein each strand of the siNA molecule is about 18 to about 28 nucleotides in length; and one strand of the siNA molecule comprises nucleotide sequence having sufficient complementarity to the interleukin and/or interleukin receptor RNA for the siNA molecule to direct cleavage of the interleukin and/or interleukin receptor RNA via RNA interference.

[0019] In one embodiment, the invention features a chemically synthesized double stranded short interfering nucleic acid (siNA) molecule that directs cleavage of an interleukin and/or interleukin receptor RNA via RNA interference (RNAi), wherein each strand of the siNA molecule is about 18 to about 23 nucleotides in length; and one strand of the siNA molecule comprises nucleotide sequence having sufficient complementarity to the interleukin and/or interleukin receptor RNA for the siNA molecule to direct cleavage of the interleukin and/or interleukin receptor RNA via RNA interference.

[0020] In one embodiment, the invention features a siNA molecule that down-regulates expression of an interleukin and/or interleukin receptor gene or that directs cleavage of a interleukin and/or interleukin receptor RNA, for example, wherein the interleukin and/or interleukin receptor gene or RNA comprises interleukin and/or interleukin receptor encoding sequence. In one embodiment, the invention features a siNA molecule that down-regulates expression of a interleukin and/or interleukin receptor gene or that directs cleavage of a interleukin and/or interleukin receptor RNA, for example, wherein the interleukin and/or interleukin receptor gene or RNA comprises interleukin and/or interleukin receptor non-coding sequence or regulatory elements involved in interleukin and/or interleukin receptor gene expression (e.g., non-coding RNA).

[0021] In one embodiment, a siNA of the invention is used to inhibit the expression of interleukin and/or interleukin receptor genes or an interleukin and/or interleukin receptor gene family (e.g., interleukin and/or interleukin receptor superfamily genes), wherein the genes or gene family sequences share sequence homology. Such homologous sequences can be identified as is known in the art, for example using sequence alignments. siNA molecules can be designed to target such homologous sequences, for example using perfectly complementary sequences or by incorporating non-canonical base pairs, for example mismatches and/or wobble base pairs, that can provide additional target sequences. In instances where mismatches are identified, non-canonical base pairs (for example, mismatches and/or wobble bases) can be used to generate siNA molecules that target more than one gene sequence. In a non-limiting example, non-canonical base pairs such as UU and CC base pairs are used to generate siNA molecules that are capable of targeting sequences for differing interleukin and/or interleukin receptor targets that share sequence homology. As such, one advantage of using siNAs of the invention is that a single siNA can be designed to include nucleic acid sequence that is complementary to the nucleotide sequence that is conserved between the homologous genes. In this approach, a single siNA can be used to inhibit expression of more than one gene instead of using more than one siNA molecule to target the different genes.

[0022] In one embodiment, the invention features a siNA molecule having RNAi activity against interleukin and/or interleukin receptor RNA (e.g., coding or non-coding RNA), wherein the siNA molecule comprises a sequence complementary to any RNA having interleukin and/or interleukin receptor encoding sequence, such as those sequences having GenBank Accession Nos. shown in Table I and U.S. Ser. No. 10/923,536 and U.S. Ser. No. 10/923,536, both incorporated by reference herein. In another embodiment, the invention features a siNA molecule having RNAi activity against interleukin and/or interleukin receptor RNA, wherein the siNA molecule comprises a sequence complementary to an RNA having variant interleukin and/or interleukin receptor encoding sequence, for example other mutant interleukin and/or interleukin receptor genes not shown in Table I but known in the art to be associated with the maintenance and/or development of cancer, inflammatory, respiratory, autoimmune, cardiovascular, neurological, and/or proliferative diseases, disorders, and/or conditions described herein or otherwise known in the art that are associated with interleukin and/or interleukin gene expression or activity. Chemical modifications as shown in Tables III and IV or otherwise described herein can be applied to any siNA construct of the invention. In another embodiment, a siNA molecule of the invention includes a nucleotide sequence that can interact with nucleotide sequence of an interleukin and/or interleukin receptor gene and thereby mediate silencing of interleukin and/or interleukin receptor gene expression, for example, wherein the siNA mediates regulation of interleukin and/or interleukin receptor gene expression by cellular processes that modulate the chromatin structure or methylation patterns of the interleukin and/or interleukin receptor gene and prevent transcription of the interleukin and/or interleukin receptor gene.

[0023] In one embodiment, siNA molecules of the invention are used to down regulate or inhibit the expression of proteins arising from interleukin and/or interleukin receptor haplotype polymorphisms that are associated with a trait, disease or condition (e.g., cancer, inflammatory, respiratory, autoimmune, cardiovascular, neurological, and/or proliferative diseases, disorders, and/or conditions). Analysis of genes, or protein or RNA levels can be used to identify subjects with such polymorphisms or those subjects who are at risk of developing traits, conditions, or diseases described herein (see for example Lin et al, 2003, New Engl. J. Med., 349, 2201-2210; Witkin et al., 2002, Clin Infect Dis., 34(2), 204-9; and Keen, 2002, ASHI Quarterly, 4, 152). These subjects are amenable to treatment, for example, treatment with siNA molecules of the invention and any other composition useful in treating diseases related to interleukin and/or interleukin receptor gene expression. As such, analysis of interleukin and/or interleukin receptor protein or RNA levels can be used to determine treatment type and the course of therapy in treating a subject. Monitoring of interleukin and/or interleukin receptor protein or RNA levels can be used to predict treatment outcome and to determine the efficacy of compounds and compositions that modulate the level and/or activity of certain interleukin and/or interleukin receptor proteins associated with a trait, disorder, condition, or disease.

[0024] In one embodiment of the invention a siNA molecule comprises an antisense strand comprising a nucleotide sequence that is complementary to a nucleotide sequence or a portion thereof encoding an interleukin and/or interleukin receptor protein. The siNA further comprises a sense strand, wherein said sense strand comprises a nucleotide sequence of an interleukin and/or interleukin receptor gene or a portion thereof.

[0025] In another embodiment, a siNA molecule comprises an antisense region comprising a nucleotide sequence that is complementary to a nucleotide sequence encoding a interleukin and/or interleukin receptor protein or a portion thereof. The siNA molecule further comprises a sense region, wherein said sense region comprises a nucleotide sequence of an interleukin and/or interleukin receptor gene or a portion thereof.

[0026] In one embodiment, the sense region or sense strand of a siNA molecule of the invention is complementary to that portion of the antisense region or antisense strand of the siNA molecule that is complementary to a target polynucleotide sequence.

[0027] In another embodiment, the invention features a siNA molecule comprising nucleotide sequence, for example, nucleotide sequence in the antisense region of the siNA molecule that is complementary to a nucleotide sequence or portion of sequence of an interleukin and/or interleukin receptor gene. In another embodiment, the invention features a siNA molecule comprising a region, for example, the antisense region of the siNA construct, complementary to a sequence comprising an interleukin and/or interleukin receptor gene sequence or a portion thereof.

[0028] In one embodiment, the antisense region of siNA constructs comprises a sequence complementary to sequence having any of target SEQ ID NOs. shown in Tables II and III. In one embodiment, the antisense region of siNA constructs of the invention constructs comprises sequence having any of antisense (lower) SEQ ID NOs. in Tables II and III and FIGS. 4 and 5. In another embodiment, the sense region of siNA constructs of the invention comprises sequence having any of sense (upper) SEQ ID NOs. in Tables II and III and FIGS. 4 and 5.

[0029] In one embodiment, a siNA molecule of the invention comprises any of SEQ ID NOs. 1-1260 and 1269-2358. The sequences shown in SEQ ID NOs: 1-1260 and 1269-2358 are not limiting. A siNA molecule of the invention can comprise any contiguous interleukin and/or interleukin receptor sequence (e.g., about 15 to about 25 or more, or about 15, 16, 17, 18, 19, 20, 21, 22, 23, 24, or 25 or more contiguous interleukin and/or interleukin receptor nucleotides).

[0030] In yet another embodiment, the invention features a siNA molecule comprising a sequence, for example, the antisense sequence of the siNA construct, complementary to a sequence or portion of sequence comprising sequence represented by GenBank Accession Nos. shown in Table I and U.S. Ser. No. 10/923,536 and U.S. Ser. No. 10/923,536, both incorporated by reference herein. Chemical modifications in Tables III and IV and otherwise described herein can be applied to any siNA construct of the invention.

[0031] In one embodiment of the invention a siNA molecule comprises an antisense strand having about 15 to about 30 (e.g., about 15, 16, 17, 18, 19, 20, 21, 22, 23, 24, 25, 26, 27, 28, 29, or 30) nucleotides, wherein the antisense strand is complementary to a RNA sequence or a portion thereof encoding interleukin and/or interleukin receptor, and wherein said siNA further comprises a sense strand having about 15 to about 30 (e.g., about 15, 16, 17, 18, 19, 20, 21, 22, 23, 24, 25, 26, 27, 28, 29, or 30) nucleotides, and wherein said sense strand and said antisense strand are distinct nucleotide sequences where at least about 15 nucleotides in each strand are complementary to the other strand.

[0032] In another embodiment of the invention a siNA molecule of the invention comprises an antisense region having about 15 to about 30 (e.g., about 15, 16, 17, 18, 19, 20, 21, 22, 23, 24, 25, 26, 27, 28, 29, or 30) nucleotides, wherein the antisense region is complementary to a RNA sequence encoding interleukin and/or interleukin receptor, and wherein said siNA further comprises a sense region having about 15 to about 30 (e.g., about 15, 16, 17, 18, 19, 20, 21, 22, 23, 24, 25, 26, 27, 28, 29, or 30) nucleotides, wherein said sense region and said antisense region are comprised in a linear molecule where the sense region comprises at least about 15 nucleotides that are complementary to the antisense region.

[0033] In one embodiment, a siNA molecule of the invention has RNAi activity that modulates expression of RNA encoded by one or more interleukin and/or interleukin receptor genes. Because interleukin and/or interleukin receptor (e.g., interleukin and/or interleukin receptor superfamily) genes can share some degree of sequence homology with each other, siNA molecules can be designed to target a class of interleukin and/or interleukin receptor genes or alternately specific interleukin and/or interleukin receptor genes (e.g., polymorphic variants) by selecting sequences that are either shared amongst different interleukin and/or interleukin receptor targets or alternatively that are unique for a specific interleukin and/or interleukin receptor target. Therefore, in one embodiment, the siNA molecule can be designed to target conserved regions of interleukin and/or interleukin receptor RNA sequences having homology among several interleukin and/or interleukin receptor gene variants so as to target a class of interleukin and/or interleukin receptor genes with one siNA molecule. Accordingly, in one embodiment, the siNA molecule of the invention modulates the expression of one or both interleukin and/or interleukin receptor alleles in a subject. In another embodiment, the siNA molecule can be designed to target a sequence that is unique to a specific interleukin and/or interleukin receptor RNA sequence (e.g., a single interleukin and/or interleukin receptor allele or interleukin and/or interleukin receptor single nucleotide polymorphism (SNP)) due to the high degree of specificity that the siNA molecule requires to mediate RNAi activity.

[0034] In one embodiment, a siNA of the invention is used to inhibit the expression of interleukin and/or interleukin receptor genes, wherein the interleukin and/or interleukin receptor sequences share sequence homology. Such homologous sequences can be identified as is known in the art, for example using sequence alignments. siNA molecules can be designed to target such homologous sequences, for example using perfectly complementary sequences or by incorporating non-canonical base pairs, for example mismatches and/or wobble base pairs, that can provide additional target sequences. In instances where mismatches are shown, non-canonical base pairs, for example mismatches and/or wobble bases, can be used to generate siNA molecules that target one or more interleukin and/or interleukin receptor RNA sequences. In a non-limiting example, non-canonical base pairs such as UU and CC base pairs are used to generate siNA molecules that are capable of targeting differing interleukin and/or interleukin receptor sequences. As such, one advantage of using siNAs of the invention is that a single siNA can be designed to include nucleic acid sequence that is complementary to the nucleotide sequence that is conserved between the interleukin and/or interleukin receptor sequences such that the siNA can interact with RNAs of interleukin and/or interleukin receptor and mediate RNAi to achieve inhibition of expression of the interleukin and/or interleukin receptor sequences. In this approach, a single siNA can be used to inhibit expression of more than one interleukin and/or interleukin receptor sequence instead of using more than one siNA molecule to target the different sequences.

[0035] In one embodiment, nucleic acid molecules of the invention that act as mediators of the RNA interference gene silencing response are double-stranded nucleic acid molecules. In another embodiment, the siNA molecules of the invention consist of duplex nucleic acid molecules containing about 15 to about 30 base pairs between oligonucleotides comprising about 15 to about 30 (e.g., about 15, 16, 17, 18, 19, 20, 21, 22, 23, 24, 25, 26, 27, 28, 29, or 30) nucleotides. In yet another embodiment, siNA molecules of the invention comprise duplex nucleic acid molecules with overhanging ends of about 1 to about 3 (e.g., about 1, 2, or 3) nucleotides, for example, about 21-nucleotide duplexes with about 19 base pairs and 3′-terminal mononucleotide, dinucleotide, or trinucleotide overhangs. In yet another embodiment, siNA molecules of the invention comprise duplex nucleic acid molecules with blunt ends, where both ends are blunt, or alternatively, where one of the ends is blunt.

[0036] In one embodiment, the nucleotides comprising the overhang portion of a siNA molecule of the invention are complementary to the target polynucleotide sequence and are optionally chemically modified as described herein. In one embodiment, the overhang comprises a 3′-GC or 3′-UU overhang that is complementary to a portion of the target polynucleotide sequence. In another embodiment, the nucleotides comprising the overhanging portion of a siNA molecule of the invention are 2′-O-methyl nucleotides and/or 2′-deoxy-2′-fluoro nucleotides.

[0037] In one embodiment, the nucleotides comprising the overhang portion of a siNA molecule of the invention are not complementary to the target polynucleotide sequence and are optionally chemically modified as described herein. In one embodiment, the overhang comprises a 3′-GC or 3′-UU overhang that is not complementary to a portion of the target polynucleotide sequence. In another embodiment, the nucleotides comprising the overhanging portion of a siNA molecule of the invention are 2′-O-methyl nucleotides and/or 2′-deoxy-2′-fluoro nucleotides.

[0038] In one embodiment, the invention features one or more chemically-modified siNA constructs having specificity for interleukin and/or interleukin receptor expressing nucleic acid molecules, such as RNA encoding an interleukin and/or interleukin receptor protein or non-coding RNA associated with the expression of interleukin and/or interleukin receptor genes. In one embodiment, the invention features a RNA based siNA molecule (e.g., a siNA comprising 2′-OH nucleotides) having specificity for interleukin and/or interleukin receptor expressing nucleic acid molecules that includes one or more chemical modifications described herein. Non-limiting examples of such chemical modifications include without limitation phosphorothioate internucleotide linkages, 2′-deoxyribonucleotides, 2′-O-methyl ribonucleotides, 2′-deoxy-2′-fluoro ribonucleotides, 4′-thio ribonucleotides, 2′-O-trifluoromethyl nucleotides, 2′-O-ethyl-trifluoromethoxy nucleotides, 2′-O-difluoromethoxy-ethoxy nucleotides (see for example U.S. Ser. No. 10/981,966 filed Nov. 5, 2004, incorporated by reference herein), “universal base” nucleotides, “acyclic” nucleotides, 5-C-methyl nucleotides, and terminal glyceryl and/or inverted deoxy abasic residue incorporation. These chemical modifications, when used in various siNA constructs, (e.g., RNA based siNA constructs), are shown to preserve RNAi activity in cells while at the same time, dramatically increasing the serum stability of these compounds. Furthermore, contrary to the data published by Parrish et al., supra, applicant demonstrates that multiple (greater than one) phosphorothioate substitutions are well-tolerated and confer substantial increases in serum stability for modified siNA constructs.

[0039] In one embodiment, a siNA molecule of the invention comprises modified nucleotides while maintaining the ability to mediate RNAi. The modified nucleotides can be used to improve in vitro or in vivo characteristics such as stability, activity, toxicity, immune response, and/or bioavailability. For example, a siNA molecule of the invention can comprise modified nucleotides as a percentage of the total number of nucleotides present in the siNA molecule. As such, a siNA molecule of the invention can generally comprise about 5% to about 100% modified nucleotides (e.g., about 5%, 10%, 15%, 20%, 25%, 30%, 35%, 40%, 45%, 50%, 55%, 60%, 65%, 70%, 75%, 80%, 85%, 90%, 95% or 100% modified nucleotides). For example, in one embodiment, between about 5% to about 100% (e.g., about 5%, 10%, 15%, 20%, 25%, 30%, 35%, 40%, 45%, 50%, 55%, 60%, 65%, 70%, 75%, 80%, 85%, 90%, 95% or 100% modified nucleotides) of the nucleotide positions in a siNA molecule of the invention comprise a nucleic acid sugar modification, such as a 2′-sugar modification, e.g., 2′-O-methyl nucleotides, 2′-deoxy-2′-fluoro nucleotides, 2′-O-methoxyethyl nucleotides, 2′-O-trifluoromethyl nucleotides, 2′-O-ethyl-trifluoromethoxy nucleotides, 2′-O-difluoromethoxy-ethoxy nucleotides, or 2′-deoxy nucleotides. In another embodiment, between about 5% to about 100% (e.g., about 5%, 10%, 15%, 20%, 25%, 30%, 35%, 40%, 45%, 50%, 55%, 60%, 65%, 70%, 75%, 80%, 85%, 90%, 95% or 100% modified nucleotides) of the nucleotide positions in a siNA molecule of the invention comprise a nucleic acid base modification, such as inosine, purine, pyridin-4-one, pyridin-2-one, phenyl, pseudouracil, 2, 4, 6-trimethoxy benzene, 3-methyl uracil, dihydrouridine, naphthyl, aminophenyl, 5-alkylcytidines (e.g., 5-methylcytidine), 5-alkyluridines (e.g., ribothymidine), 5-halouridine (e.g., 5-bromouridine) or 6-azapyrimidines or 6-alkylpyrimidines (e.g. 6-methyluridine), or propyne modifications. In another embodiment, between about 5% to about 100% (e.g., about 5%, 10%, 15%, 20%, 25%, 30%, 35%, 40%, 45%, 50%, 55%, 60%, 65%, 70%, 75%, 80%, 85%, 90%, 95% or 100% modified nucleotides) of the nucleotide positions in a siNA molecule of the invention comprise a nucleic acid backbone modification, such as a backbone modification having Formula I herein. In another embodiment, between about 5% to about 100% (e.g., about 5%, 10%, 15%, 20%, 25%, 30%, 35%, 40%, 45%, 50%, 55%, 60%, 65%, 70%, 75%, 80%, 85%, 90%, 95% or 100% modified nucleotides) of the nucleotide positions in a siNA molecule of the invention comprise a nucleic acid sugar, base, or backbone modification or any combination thereof (e.g., any combination of nucleic acid sugar, base, backbone or non-nucleotide modifications herein). The actual percentage of modified nucleotides present in a given siNA molecule will depend on the total number of nucleotides present in the siNA. If the siNA molecule is single stranded, the percent modification can be based upon the total number of nucleotides present in the single stranded siNA molecules. Likewise, if the siNA molecule is double stranded, the percent modification can be based upon the total number of nucleotides present in the sense strand, antisense strand, or both the sense and antisense strands.

[0040] A siNA molecule of the invention can comprise modified nucleotides at various locations within the siNA molecule. In one embodiment, a double stranded siNA molecule of the invention comprises modified nucleotides at internal base paired positions within the siNA duplex. For example, internal positions can comprise positions from about 3 to about 19 nucleotides from the 5′-end of either sense or antisense strand or region of a 21 nucleotide siNA duplex having 19 base pairs and two nucleotide 3′-overhangs. In another embodiment, a double stranded siNA molecule of the invention comprises modified nucleotides at non-base paired or overhang regions of the siNA molecule. By “non-base paired” is meant, the nucleotides are not base paired between the sense strand or sense region and the antisense strand or antisense region or the siNA molecule. The overhang nucleotides can be complementary or base paired to a corresponding target polynucleotide sequence. For example, overhang positions can comprise positions from about 20 to about 21 nucleotides from the 5′-end of either sense or antisense strand or region of a 21 nucleotide siNA duplex having 19 base pairs and two nucleotide 3′-overhangs. In another embodiment, a double stranded siNA molecule of the invention comprises modified nucleotides at terminal positions of the siNA molecule. For example, such terminal regions include the 3′-position, 5′-position, for both 3′ and 5′-positions of the sense and/or antisense strand or region of the siNA molecule. In another embodiment, a double stranded siNA molecule of the invention comprises modified nucleotides at base-paired or internal positions, non-base paired or overhang regions, and/or terminal regions, or any combination thereof.

[0041] One aspect of the invention features a double-stranded short interfering nucleic acid (siNA) molecule that down-regulates expression of an interleukin and/or interleukin receptor gene or that directs cleavage of an interleukin and/or interleukin receptor RNA. In one embodiment, the double stranded siNA molecule comprises one or more chemical modifications and each strand of the double-stranded siNA is about 21 nucleotides long. In one embodiment, the double-stranded siNA molecule does not contain any ribonucleotides. In another embodiment, the double-stranded siNA molecule comprises one or more ribonucleotides. In one embodiment, each strand of the double-stranded siNA molecule independently comprises about 15 to about 30 (e.g., about 15, 16, 17, 18, 19, 20, 21, 22, 23, 24, 25, 26, 27, 28, 29, or 30) nucleotides, wherein each strand comprises about 15 to about 30 (e.g., about 15, 16, 17, 18, 19, 20, 21, 22, 23, 24, 25, 26, 27, 28, 29, or 30) nucleotides that are complementary to the nucleotides of the other strand. In one embodiment, one of the strands of the double-stranded siNA molecule comprises a nucleotide sequence that is complementary to a nucleotide sequence or a portion thereof of the interleukin and/or interleukin receptor gene, and the second strand of the double-stranded siNA molecule comprises a nucleotide sequence substantially similar to the nucleotide sequence of the interleukin and/or interleukin receptor gene or a portion thereof.

[0042] In another embodiment, the invention features a double-stranded short interfering nucleic acid (siNA) molecule that down-regulates expression of an interleukin and/or interleukin receptor gene or that directs cleavage of an interleukin and/or interleukin receptor RNA, comprising an antisense region, wherein the antisense region comprises a nucleotide sequence that is complementary to a nucleotide sequence of the interleukin and/or interleukin receptor gene or a portion thereof, and a sense region, wherein the sense region comprises a nucleotide sequence substantially similar to the nucleotide sequence of the interleukin and/or interleukin receptor gene or a portion thereof. In one embodiment, the antisense region and the sense region independently comprise about 15 to about 30 (e.g. about 15, 16, 17, 18, 19, 20, 21, 22, 23, 24, 25, 26, 27, 28, 29, or 30) nucleotides, wherein the antisense region comprises about 15 to about 30 (e.g. about 15, 16, 17, 18, 19, 20, 21, 22, 23, 24, 25, 26, 27, 28, 29, or 30) nucleotides that are complementary to nucleotides of the sense region.

[0043] In another embodiment, the invention features a double-stranded short interfering nucleic acid (siNA) molecule that down-regulates expression of an interleukin and/or interleukin receptor gene or that directs cleavage of an interleukin and/or interleukin receptor RNA, comprising a sense region and an antisense region, wherein the antisense region comprises a nucleotide sequence that is complementary to a nucleotide sequence of RNA encoded by the interleukin and/or interleukin receptor gene or a portion thereof and the sense region comprises a nucleotide sequence that is complementary to the antisense region.

[0044] In one embodiment, a siNA molecule of the invention comprises blunt ends, i.e., ends that do not include any overhanging nucleotides. For example, a siNA molecule comprising modifications described herein (e.g., comprising nucleotides having Formulae I-VII or siNA constructs comprising “Stab 00”-“Stab 34” or “Stab 3F”-“Stab 34F” (Table IV) or any combination thereof (see Table IV)) and/or any length described herein can comprise blunt ends or ends with no overhanging nucleotides.

[0045] In one embodiment, any siNA molecule of the invention can comprise one or more blunt ends, i.e. where a blunt end does not have any overhanging nucleotides. In one embodiment, the blunt ended siNA molecule has a number of base pairs equal to the number of nucleotides present in each strand of the siNA molecule. In another embodiment, the siNA molecule comprises one blunt end, for example wherein the 5′-end of the antisense strand and the 3′-end of the sense strand do not have any overhanging nucleotides. In another example, the siNA molecule comprises one blunt end, for example wherein the 3′-end of the antisense strand and the 5′-end of the sense strand do not have any overhanging nucleotides. In another example, a siNA molecule comprises two blunt ends, for example wherein the 3′-end of the antisense strand and the 5′-end of the sense strand as well as the 5′-end of the antisense strand and 3′-end of the sense strand do not have any overhanging nucleotides. A blunt ended siNA molecule can comprise, for example, from about 15 to about 30 nucleotides (e.g., about 15, 16, 17, 18, 19, 20, 21, 22, 23, 24, 25, 26, 27, 28, 29, or 30 nucleotides). Other nucleotides present in a blunt ended siNA molecule can comprise, for example, mismatches, bulges, loops, or wobble base pairs to modulate the activity of the siNA molecule to mediate RNA interference.

[0046] By “blunt ends” is meant symmetric termini or termini of a double stranded siNA molecule having no overhanging nucleotides. The two strands of a double stranded siNA molecule align with each other without over-hanging nucleotides at the termini. For example, a blunt ended siNA construct comprises terminal nucleotides that are complementary between the sense and antisense regions of the siNA molecule.

[0047] In one embodiment, the invention features a double-stranded short interfering nucleic acid (siNA) molecule that down-regulates expression of an interleukin and/or interleukin receptor gene or that directs cleavage of an interleukin and/or interleukin receptor RNA, wherein the siNA molecule is assembled from two separate oligonucleotide fragments wherein one fragment comprises the sense region and the second fragment comprises the antisense region of the siNA molecule. The sense region can be connected to the antisense region via a linker molecule, such as a polynucleotide linker or a non-nucleotide linker.

[0048] In one embodiment, a siNA molecule of the invention comprises ribonucleotides at positions that maintain or enhance RNAi activity. In one embodiment, ribonucleotides are present in the sense strand or sense region of the siNA molecule, which can provide for RNAi activity by allowing cleavage of the sense strand or sense region by RISC (e.g., ribonucleotides present at positions 9 and 10 of the sense strand or sense region). In another embodiment, ribonucleotides are present at 5′-end of the antisense strand or antisense region of the siNA molecule, which can provide for RNAi activity by improving helicase activity or recognition or the siNA by RISC.

[0049] In one embodiment, a siNA molecule of the invention contains at least 2, 3, 4, 5, or more chemical modifications that can be the same of different. In another embodiment, a siNA molecule of the invention contains at least 2, 3, 4, 5, or more different chemical modifications.

[0050] In one embodiment, a siNA molecule of the invention is a double-stranded short interfering nucleic acid (siNA), wherein the double stranded nucleic acid molecule comprises about 15 to about 30 (e.g. about 15, 16, 17, 18, 19, 20, 21, 22, 23, 24, 25, 26, 27, 28, 29, or 30) base pairs, and wherein one or more (e.g., at least 1, 2, 3, 4, 5, 6, 7, 8, 9, 10, 11, 12, 13, 14, 15, 16, 17, 18, 19, 20, 21, 22, 23, 24, 25, 26, 27, 28, 29, or 30) of the nucleotide positions in each strand of the siNA molecule comprises a chemical modification. In one embodiment, the siNA contains at least 2, 3, 4, 5, or more chemical modifications that can be the same of different. In another embodiment, the siNA contains at least 2, 3, 4, 5, or more different chemical modifications.

[0051] In one embodiment, the invention features double-stranded short interfering nucleic acid (siNA) molecule that down-regulates expression of an interleukin and/or interleukin receptor gene or that directs cleavage of an interleukin and/or interleukin receptor RNA, wherein the siNA molecule comprises about 15 to about 30 (e.g. about 15, 16, 17, 18, 19, 20, 21, 22, 23, 24, 25, 26, 27, 28, 29, or 30) base pairs, and wherein each strand of the siNA molecule comprises one or more chemical modifications. In one embodiment, each strand of the double stranded siNA molecule comprises at least two (e.g., 2, 3, 4, 5, or more) different chemical modifications, e.g., different nucleotide sugar, base, or backbone modifications. In another embodiment, one of the strands of the double-stranded siNA molecule comprises a nucleotide sequence that is complementary to a nucleotide sequence of an interleukin and/or interleukin receptor gene or a portion thereof, and the second strand of the double-stranded siNA molecule comprises a nucleotide sequence substantially similar to the nucleotide sequence or a portion thereof of the interleukin and/or interleukin receptor gene. In another embodiment, one of the strands of the double-stranded siNA molecule comprises a nucleotide sequence that is complementary to a nucleotide sequence of an interleukin and/or interleukin receptor gene or portion thereof, and the second strand of the double-stranded siNA molecule comprises a nucleotide sequence substantially similar to the nucleotide sequence or portion thereof of the interleukin and/or interleukin receptor gene. In another embodiment, each strand of the siNA molecule comprises about 15 to about 30 (e.g. about 15, 16, 17, 18, 19, 20, 21, 22, 23, 24, 25, 26, 27, 28, 29, or 30) nucleotides, and each strand comprises at least about 15 to about 30 (e.g. about 15, 16, 17, 18, 19, 20, 21, 22, 23, 24, 25, 26, 27, 28, 29, or 30) nucleotides that are complementary to the nucleotides of the other strand. The interleukin and/or interleukin receptor gene can comprise, for example, sequences referred to in Table I or otherwise described herein or incorporated herein by reference.

[0052] In one embodiment, each strand of a double stranded siNA molecule of the invention comprises a different pattern of chemical modifications, such as any “Stab 00”-“Stab 34” or “Stab 3F”-“Stab 34F” (Table IV) modification patterns herein or any combination thereof (see Table IV). Non-limiting examples of sense and antisense strands of such siNA molecules having various modification patterns are shown in Table III.

[0053] In one embodiment, a siNA molecule of the invention comprises no ribonucleotides. In another embodiment, a siNA molecule of the invention comprises ribonucleotides.

[0054] In one embodiment, a siNA molecule of the invention comprises an antisense region comprising a nucleotide sequence that is complementary to a nucleotide sequence of an interleukin and/or interleukin receptor gene or a portion thereof, and the siNA further comprises a sense region comprising a nucleotide sequence substantially similar to the nucleotide sequence of the interleukin and/or interleukin receptor gene or a portion thereof. In another embodiment, the antisense region and the sense region each comprise about 15 to about 30 (e.g. about 15, 16, 17, 18, 19, 20, 21, 22, 23, 24, 25, 26, 27, 28, 29, or 30) nucleotides and the antisense region comprises at least about 15 to about 30 (e.g. about 15, 16, 17, 18, 19, 20, 21, 22, 23, 24, 25, 26, 27, 28, 29, or 30) nucleotides that are complementary to nucleotides of the sense region. In one embodiment, each strand of the double stranded siNA molecule comprises at least two (e.g., 2, 3, 4, 5, or more) different chemical modifications, e.g., different nucleotide sugar, base, or backbone modifications. The interleukin and/or interleukin receptor gene can comprise, for example, sequences referred to in Table I or incorporated by reference herein. In another embodiment, the siNA is a double stranded nucleic acid molecule, where each of the two strands of the siNA molecule independently comprise about 15 to about 40 (e.g. about 15, 16, 17, 18, 19, 20, 21, 22, 23, 24, 25, 26, 27, 28, 29, 30, 31, 23, 33, 34, 35, 36, 37, 38, 39, or 40) nucleotides, and where one of the strands of the siNA molecule comprises at least about 15 (e.g. about 15, 16, 17, 18, 19, 20, 21, 22, 23, 24 or 25 or more) nucleotides that are complementary to the nucleic acid sequence of the interleukin and/or interleukin receptor gene or a portion thereof.

[0055] In one embodiment, a siNA molecule of the invention comprises a sense region and an antisense region, wherein the antisense region comprises a nucleotide sequence that is complementary to a nucleotide sequence of RNA encoded by an interleukin and/or interleukin receptor gene, or a portion thereof, and the sense region comprises a nucleotide sequence that is complementary to the antisense region. In one embodiment, the siNA molecule is assembled from two separate oligonucleotide fragments, wherein one fragment comprises the sense region and the second fragment comprises the antisense region of the siNA molecule. In another embodiment, the sense region is connected to the antisense region via a linker molecule. In another embodiment, the sense region is connected to the antisense region via a linker molecule, such as a nucleotide or non-nucleotide linker. In one embodiment, each strand of the double stranded siNA molecule comprises at least two (e.g., 2, 3, 4, 5, or more) different chemical modifications, e.g., different nucleotide sugar, base, or backbone modifications. The interleukin and/or interleukin receptor gene can comprise, for example, sequences referred in to Table I or incorporated by reference herein.

[0056] In one embodiment, the invention features a double-stranded short interfering nucleic acid (siNA) molecule that down-regulates expression of an interleukin and/or interleukin receptor gene or that directs cleavage of an interleukin and/or interleukin receptor RNA, comprising a sense region and an antisense region, wherein the antisense region comprises a nucleotide sequence that is complementary to a nucleotide sequence of RNA encoded by the interleukin and/or interleukin receptor gene or a portion thereof and the sense region comprises a nucleotide sequence that is complementary to the antisense region, and wherein the siNA molecule has one or more modified pyrimidine and/or purine nucleotides. In one embodiment, the pyrimidine nucleotides in the sense region are 2′-O-methylpyrimidine nucleotides or 2′-deoxy-2′-fluoro pyrimidine nucleotides and the purine nucleotides present in the sense region are 2′-deoxy purine nucleotides. In one embodiment, each strand of the double stranded siNA molecule comprises at least two (e.g., 2, 3, 4, 5, or more) different chemical modifications, e.g., different nucleotide sugar, base, or backbone modifications. In another embodiment, the pyrimidine nucleotides in the sense region are 2′-deoxy-2′-fluoro pyrimidine nucleotides and the purine nucleotides present in the sense region are 2′-O-methyl purine nucleotides. In another embodiment, the pyrimidine nucleotides in the sense region are 2′-deoxy-2′-fluoro pyrimidine nucleotides and the purine nucleotides present in the sense region are 2′-deoxy purine nucleotides. In one embodiment, the pyrimidine nucleotides in the antisense region are 2′-deoxy-2′-fluoro pyrimidine nucleotides and the purine nucleotides present in the antisense region are 2′-O-methyl or 2′-deoxy purine nucleotides. In another embodiment of any of the above-described siNA molecules, any nucleotides present in a non-complementary region of the sense strand (e.g. overhang region) are 2′-deoxy nucleotides.

[0057] In one embodiment, the invention features a double-stranded short interfering nucleic acid (siNA) molecule that down-regulates expression of an interleukin and/or interleukin receptor gene or that directs cleavage of an interleukin and/or interleukin receptor RNA, wherein the siNA molecule is assembled from two separate oligonucleotide fragments wherein one fragment comprises the sense region and the second fragment comprises the antisense region of the siNA molecule, and wherein the fragment comprising the sense region includes a terminal cap moiety at the 5′-end, the 3′-end, or both of the 5′ and 3′ ends of the fragment. In one embodiment, the terminal cap moiety is an inverted deoxy abasic moiety or glyceryl moiety. In one embodiment, each of the two fragments of the siNA molecule independently comprise about 15 to about 30 (e.g. about 15, 16, 17, 18, 19, 20, 21, 22, 23, 24, 25, 26, 27, 28, 29, or 30) nucleotides. In another embodiment, each of the two fragments of the siNA molecule independently comprise about 15 to about 40 (e.g. about 15, 16, 17, 18, 19, 20, 21, 22, 23, 24, 25, 26, 27, 28, 29, 30, 31, 23, 33, 34, 35, 36, 37, 38, 39, or 40) nucleotides. In a non-limiting example, each of the two fragments of the siNA molecule comprise about 21 nucleotides.

[0058] In one embodiment, the invention features a siNA molecule comprising at least one modified nucleotide, wherein the modified nucleotide is a 2′-deoxy-2′-fluoro nucleotide, 2′-O-trifluoromethyl nucleotide, 2′-O-ethyl-trifluoromethoxy nucleotide, or 2′-O-difluoromethoxy-ethoxy nucleotide or any other modified nucleoside/nucleotide described herein and in U.S. Ser. No. 10/981,966 filed Nov. 5, 2004, incorporated by reference herein. In one embodiment, the invention features a siNA molecule comprising at least two (e.g., 2, 3, 4, 5, 6, 7, 8, 9, 10, or more) modified nucleotides, wherein the modified nucleotide is selected from the group consisting of 2′-deoxy-2′-fluoro nucleotide, 2′-O-trifluoromethyl nucleotide, 2′-O-ethyl-trifluoromethoxy nucleotide, or 2′-O-difluoromethoxy-ethoxy nucleotide or any other modified nucleoside/nucleotide described herein and in U.S. Ser. No. 10/981,966, filed Nov. 5, 2004, incorporated by reference herein. The modified nucleotide/nucleoside can be the same or different. The siNA can be, for example, about 15 to about 40 nucleotides in length. In one embodiment, all pyrimidine nucleotides present in the siNA are 2′-deoxy-2′-fluoro, 2′-O-trifluoromethyl, 2′-O-ethyl-trifluoromethoxy, or 2′-O-difluoromethoxy-ethoxy, 4′-thio pyrimidine nucleotides. In one embodiment, the modified nucleotides in the siNA include at least one 2′-deoxy-2′-fluoro cytidine or 2′-deoxy-2′-fluoro uridine nucleotide. In another embodiment, the modified nucleotides in the siNA include at least one 2′-fluoro cytidine and at least one 2′-deoxy-2′-fluoro uridine nucleotides. In one embodiment, all uridine nucleotides present in the siNA are 2′-deoxy-2′-fluoro uridine nucleotides. In one embodiment, all cytidine nucleotides present in the siNA are 2′-deoxy-2′-fluoro cytidine nucleotides. In one embodiment, all adenosine nucleotides present in the siNA are 2′-deoxy-2′-fluoro adenosine nucleotides. In one embodiment, all guanosine nucleotides present in the siNA are 2′-deoxy-2′-fluoro guanosine nucleotides. The siNA can further comprise at least one modified internucleotidic linkage, such as phosphorothioate linkage. In one embodiment, the 2′-deoxy-2′-fluoronucleotides are present at specifically selected locations in the siNA that are sensitive to cleavage by ribonucleases, such as locations having pyrimidine nucleotides.

[0059] In one embodiment, the invention features a method of increasing the stability of a siNA molecule against cleavage by ribonucleases comprising introducing at least one modified nucleotide into the siNA molecule, wherein the modified nucleotide is a 2′-deoxy-2′-fluoro nucleotide. In one embodiment, all pyrimidine nucleotides present in the siNA are 2′-deoxy-2′-fluoro pyrimidine nucleotides. In one embodiment, the modified nucleotides in the siNA include at least one 2′-deoxy-2′-fluoro cytidine or 2′-deoxy-2′-fluoro uridine nucleotide. In another embodiment, the modified nucleotides in the siNA include at least one 2′-fluoro cytidine and at least one 2′-deoxy-2′-fluoro uridine nucleotides. In one embodiment, all uridine nucleotides present in the siNA are 2′-deoxy-2′-fluoro uridine nucleotides. In one embodiment, all cytidine nucleotides present in the siNA are 2′-deoxy-2′-fluoro cytidine nucleotides. In one embodiment, all adenosine nucleotides present in the siNA are 2′-deoxy-2′-fluoro adenosine nucleotides.

[0060] In one embodiment, all guanosine nucleotides present in the siNA are 2′-deoxy-2′-fluoro guanosine nucleotides. The siNA can further comprise at least one modified internucleotidic linkage, such as a phosphorothioate linkage. In one embodiment, the 2′-deoxy-2′-fluoronucleotides are present at specifically selected locations in the siNA that are sensitive to cleavage by ribonucleases, such as locations having pyrimidine nucleotides.

[0061] In one embodiment, the invention features a double-stranded short interfering nucleic acid (siNA) molecule that down-regulates expression of an interleukin and/or interleukin receptor gene or that directs cleavage of an interleukin and/or interleukin receptor RNA, comprising a sense region and an antisense region, wherein the antisense region comprises a nucleotide sequence that is complementary to a nucleotide sequence of RNA encoded by the interleukin and/or interleukin receptor gene or a portion thereof and the sense region comprises a nucleotide sequence that is complementary to the antisense region, and wherein the purine nucleotides present in the antisense region comprise 2′-deoxy-purine nucleotides. In an alternative embodiment, the purine nucleotides present in the antisense region comprise 2′-O-methyl purine nucleotides. In either of the above embodiments, the antisense region can comprise a phosphorothioate internucleotide linkage at the 3′ end of the antisense region. Alternatively, in either of the above embodiments, the antisense region can comprise a glyceryl modification at the 3′ end of the antisense region. In another embodiment of any of the above-described siNA molecules, any nucleotides present in a non-complementary region of the antisense strand (e.g. overhang region) are 2′-deoxy nucleotides.

[0062] In one embodiment, the antisense region of a siNA molecule of the invention comprises sequence complementary to a portion of an endogenous transcript having sequence unique to a particular interleukin and/or interleukin receptor disease or trait related allele in a subject or organism, such as sequence comprising a single nucleotide polymorphism (SNP) associated with the disease or trait specific allele. As such, the antisense region of a siNA molecule of the invention can comprise sequence complementary to sequences that are unique to a particular allele to provide specificity in mediating selective RNAi against the disease, condition, or trait related allele.

[0063] In one embodiment, the invention features a double-stranded short interfering nucleic acid (siNA) molecule that down-regulates expression of an interleukin and/or interleukin receptor gene or that directs cleavage of an interleukin and/or interleukin receptor RNA, wherein the siNA molecule is assembled from two separate oligonucleotide fragments wherein one fragment comprises the sense region and the second fragment comprises the antisense region of the siNA molecule. In one embodiment, each strand of the double stranded siNA molecule, is about 21 nucleotides long where about 19 nucleotides of each fragment of the siNA molecule are base-paired to the complementary nucleotides of the other fragment of the siNA molecule, wherein at least two 3′ terminal nucleotides of each fragment of the siNA molecule are not base-paired to the nucleotides of the other fragment of the siNA molecule. In another embodiment, the siNA molecule is a double stranded nucleic acid molecule, where each strand is about 19 nucleotide long and where the nucleotides of each fragment of the siNA molecule are base-paired to the complementary nucleotides of the other fragment of the siNA molecule to form at least about 15 (e.g., 15, 16, 17, 18, or 19) base pairs, wherein one or both ends of the siNA molecule are blunt ends. In one embodiment, each of the two 3′ terminal nucleotides of each fragment of the siNA molecule is a 2′-deoxy-pyrimidine nucleotide, such as a 2′-deoxy-thymidine. In another embodiment, all nucleotides of each fragment of the siNA molecule are base-paired to the complementary nucleotides of the other fragment of the siNA molecule. In another embodiment, the siNA molecule is a double stranded nucleic acid molecule of about 19 to about 25 base pairs having a sense region and an antisense region, where about 19 nucleotides of the antisense region are base-paired to the nucleotide sequence or a portion thereof of the RNA encoded by the interleukin and/or interleukin receptor gene. In another embodiment, about 21 nucleotides of the antisense region are base-paired to the nucleotide sequence or a portion thereof of the RNA encoded by the interleukin and/or interleukin receptor gene. In any of the above embodiments, the 5′-end of the fragment comprising said antisense region can optionally include a phosphate group.

[0064] In one embodiment, the invention features a double-stranded short interfering nucleic acid (siNA) molecule that inhibits the expression of an interleukin and/or interleukin receptor RNA sequence (e.g., wherein said target RNA sequence is encoded by an interleukin and/or interleukin receptor gene involved in the interleukin and/or interleukin receptor pathway), wherein the siNA molecule does not contain any ribonucleotides and wherein each strand of the double-stranded siNA molecule is about 15 to about 30 nucleotides. In one embodiment, the siNA molecule is 21 nucleotides in length. Examples of non-ribonucleotide containing siNA constructs are combinations of stabilization chemistries shown in Table IV in any combination of Sense/Antisense chemistries, such as Stab 7/8, Stab 7/11, Stab 8/8, Stab 18/8, Stab 18/11, Stab 12/13, Stab 7/13, Stab 18/13, Stab 7/19, Stab 8/19, Stab 18/19, Stab 7/20, Stab 8/20, Stab 18/20, Stab 7/32, Stab 8/32, or Stab 18/32 (e.g., any siNA having Stab 7, 8, 11, 12, 13, 14, 15, 17, 18, 19, 20, or 32 sense or antisense strands or any combination thereof). Herein, numeric Stab chemistries can include both 2′-fluoro and 2′-OCF3 versions of the chemistries shown in Table IV. For example, “Stab 7/8” refers to both Stab 7/8 and Stab 7F/8F etc. In one embodiment, the invention features a chemically synthesized double stranded RNA molecule that directs cleavage of an interleukin and/or interleukin receptor RNA via RNA interference, wherein each strand of said RNA molecule is about 15 to about 30 nucleotides in length; one strand of the RNA molecule comprises nucleotide sequence having sufficient complementarity to the interleukin and/or interleukin receptor RNA for the RNA molecule to direct cleavage of the interleukin and/or interleukin receptor RNA via RNA interference; and wherein at least one strand of the RNA molecule optionally comprises one or more chemically modified nucleotides described herein, such as without limitation deoxynucleotides, 2′-O-methyl nucleotides, 2′-deoxy-2′-fluoro nucleotides, 2′-O-methoxyethyl nucleotides, 4′-thio nucleotides, 2′-O-trifluoromethyl nucleotides, 2′-O-ethyl-trifluoromethoxy nucleotides, 2′-O-difluoromethoxy-ethoxy nucleotides, etc.

[0065] In one embodiment, an interleukin and/or interleukin receptor RNA of the invention comprises sequence encoding an interleukin and/or interleukin receptor protein.

[0066] In one embodiment, an interleukin and/or interleukin receptor RNA of the invention comprises non-coding RNA sequence (e.g., miRNA, snRNA, siRNA etc.), see for example Mattick, 2005, Science, 309, 1527-1528 and Clayerie, 2005, Science, 309, 1529-1530.

[0067] In one embodiment, the invention features a medicament comprising a siNA molecule of the invention.

[0068] In one embodiment, the invention features an active ingredient comprising a siNA molecule of the invention.

[0069] In one embodiment, the invention features the use of a double-stranded short interfering nucleic acid (siNA) molecule to inhibit, down-regulate, or reduce expression of a interleukin and/or interleukin receptor gene, wherein the siNA molecule comprises one or more chemical modifications and each strand of the double-stranded siNA is independently about 15 to about 30 or more (e.g., about 15, 16, 17, 18, 19, 20, 21, 22, 23, 24, 25, 26, 27, 28, 29 or 30 or more) nucleotides long. In one embodiment, the siNA molecule of the invention is a double stranded nucleic acid molecule comprising one or more chemical modifications, where each of the two fragments of the siNA molecule independently comprise about 15 to about 40 (e.g. about 15, 16, 17, 18, 19, 20, 21, 22, 23, 24, 25, 26, 27, 28, 29, 30, 31, 23, 33, 34, 35, 36, 37, 38, 39, or 40) nucleotides and where one of the strands comprises at least 15 nucleotides that are complementary to nucleotide sequence of interleukin and/or interleukin receptor encoding RNA or a portion thereof. In a non-limiting example, each of the two fragments of the siNA molecule comprise about 21 nucleotides. In another embodiment, the siNA molecule is a double stranded nucleic acid molecule comprising one or more chemical modifications, where each strand is about 21 nucleotide long and where about 19 nucleotides of each fragment of the siNA molecule are base-paired to the complementary nucleotides of the other fragment of the siNA molecule, wherein at least two 3′ terminal nucleotides of each fragment of the siNA molecule are not base-paired to the nucleotides of the other fragment of the siNA molecule. In another embodiment, the siNA molecule is a double stranded nucleic acid molecule comprising one or more chemical modifications, where each strand is about 19 nucleotide long and where the nucleotides of each fragment of the siNA molecule are base-paired to the complementary nucleotides of the other fragment of the siNA molecule to form at least about 15 (e.g., 15, 16, 17, 18, or 19) base pairs, wherein one or both ends of the siNA molecule are blunt ends. In one embodiment, each of the two 3′ terminal nucleotides of each fragment of the siNA molecule is a 2′-deoxy-pyrimidine nucleotide, such as a 2′-deoxy-thymidine. In another embodiment, all nucleotides of each fragment of the siNA molecule are base-paired to the complementary nucleotides of the other fragment of the siNA molecule. In another embodiment, the siNA molecule is a double stranded nucleic acid molecule of about 19 to about 25 base pairs having a sense region and an antisense region and comprising one or more chemical modifications, where about 19 nucleotides of the antisense region are base-paired to the nucleotide sequence or a portion thereof of the RNA encoded by the interleukin and/or interleukin receptor gene. In another embodiment, about 21 nucleotides of the antisense region are base-paired to the nucleotide sequence or a portion thereof of the RNA encoded by the interleukin and/or interleukin receptor gene. In any of the above embodiments, the 5′-end of the fragment comprising said antisense region can optionally include a phosphate group.

[0070] In one embodiment, the invention features the use of a double-stranded short interfering nucleic acid (siNA) molecule that inhibits, down-regulates, or reduces expression of an interleukin and/or interleukin receptor gene, wherein one of the strands of the double-stranded siNA molecule is an antisense strand which comprises nucleotide sequence that is complementary to nucleotide sequence of interleukin and/or interleukin receptor RNA or a portion thereof, the other strand is a sense strand which comprises nucleotide sequence that is complementary to a nucleotide sequence of the antisense strand. In one embodiment, each strand has at least two (e.g., 2, 3, 4, 5, or more) chemical modifications, which can be the same or different, such as nucleotide, sugar, base, or backbone modifications. In one embodiment, a majority of the pyrimidine nucleotides present in the double-stranded siNA molecule comprises a sugar modification. In one embodiment, a majority of the purine nucleotides present in the double-stranded siNA molecule comprises a sugar modification.

[0071] In one embodiment, the invention features a double-stranded short interfering nucleic acid (siNA) molecule that inhibits, down-regulates, or reduces expression of an interleukin and/or interleukin receptor gene, wherein one of the strands of the double-stranded siNA molecule is an antisense strand which comprises nucleotide sequence that is complementary to nucleotide sequence of interleukin and/or interleukin receptor RNA or a portion thereof, wherein the other strand is a sense strand which comprises nucleotide sequence that is complementary to a nucleotide sequence of the antisense strand. In one embodiment, each strand has at least two (e.g., 2, 3, 4, 5, or more) chemical modifications, which can be the same or different, such as nucleotide, sugar, base, or backbone modifications. In one embodiment, a majority of the pyrimidine nucleotides present in the double-stranded siNA molecule comprises a sugar modification. In one embodiment, a majority of the purine nucleotides present in the double-stranded siNA molecule comprises a sugar modification.

[0072] In one embodiment, the invention features a double-stranded short interfering nucleic acid (siNA) molecule that inhibits, down-regulates, or reduces expression of an interleukin and/or interleukin receptor gene, wherein one of the strands of the double-stranded siNA molecule is an antisense strand which comprises nucleotide sequence that is complementary to nucleotide sequence of interleukin and/or interleukin receptor RNA that encodes a protein or portion thereof, the other strand is a sense strand which comprises nucleotide sequence that is complementary to a nucleotide sequence of the antisense strand and wherein a majority of the pyrimidine nucleotides present in the double-stranded siNA molecule comprises a sugar modification. In one embodiment, each strand of the siNA molecule comprises about 15 to about 30 or more (e.g., about 15, 16, 17, 18, 19, 20, 21, 22, 23, 24, 25, 26, 27, 28, 29, or 30 or more) nucleotides, wherein each strand comprises at least about 15 nucleotides that are complementary to the nucleotides of the other strand. In one embodiment, the siNA molecule is assembled from two oligonucleotide fragments, wherein one fragment comprises the nucleotide sequence of the antisense strand of the siNA molecule and a second fragment comprises nucleotide sequence of the sense region of the siNA molecule. In one embodiment, the sense strand is connected to the antisense strand via a linker molecule, such as a polynucleotide linker or a non-nucleotide linker. In a further embodiment, the pyrimidine nucleotides present in the sense strand are 2′-deoxy-2′fluoro pyrimidine nucleotides and the purine nucleotides present in the sense region are 2′-deoxy purine nucleotides. In another embodiment, the pyrimidine nucleotides present in the sense strand are 2′-deoxy-2′fluoro pyrimidine nucleotides and the purine nucleotides present in the sense region are 2′-O-methyl purine nucleotides. In still another embodiment, the pyrimidine nucleotides present in the antisense strand are 2′-deoxy-2′-fluoro pyrimidine nucleotides and any purine nucleotides present in the antisense strand are 2′-deoxy purine nucleotides. In another embodiment, the antisense strand comprises one or more 2′-deoxy-2′-fluoro pyrimidine nucleotides and one or more 2′-O-methyl purine nucleotides. In another embodiment, the pyrimidine nucleotides present in the antisense strand are 2′-deoxy-2′-fluoro pyrimidine nucleotides and any purine nucleotides present in the antisense strand are 2′-O-methyl purine nucleotides. In a further embodiment the sense strand comprises a 3′-end and a 5′-end, wherein a terminal cap moiety (e.g., an inverted deoxy abasic moiety or inverted deoxy nucleotide moiety such as inverted thymidine) is present at the 5′-end, the 3′-end, or both of the 5′ and 3′ ends of the sense strand. In another embodiment, the antisense strand comprises a phosphorothioate internucleotide linkage at the 3′ end of the antisense strand. In another embodiment, the antisense strand comprises a glyceryl modification at the 3′ end. In another embodiment, the 5′-end of the antisense strand optionally includes a phosphate group.

[0073] In any of the above-described embodiments of a double-stranded short interfering nucleic acid (siNA) molecule that inhibits expression of an interleukin and/or interleukin receptor gene, wherein a majority of the pyrimidine nucleotides present in the double-stranded siNA molecule comprises a sugar modification, each of the two strands of the siNA molecule can comprise about 15 to about 30 or more (e.g., about 15, 16, 17, 18, 19, 20, 21, 22, 23, 24, 25, 26, 27, 28, 29, or 30 or more) nucleotides. In one embodiment, about 15 to about 30 or more (e.g., about 15, 16, 17, 18, 19, 20, 21, 22, 23, 24, 25, 26, 27, 28, 29, or 30 or more) nucleotides of each strand of the siNA molecule are base-paired to the complementary nucleotides of the other strand of the siNA molecule. In another embodiment, about 15 to about 30 or more (e.g., about 15, 16, 17, 18, 19, 20, 21, 22, 23, 24, 25, 26, 27, 28, 29, or 30 or more) nucleotides of each strand of the siNA molecule are base-paired to the complementary nucleotides of the other strand of the siNA molecule, wherein at least two 3′ terminal nucleotides of each strand of the siNA molecule are not base-paired to the nucleotides of the other strand of the siNA molecule. In another embodiment, each of the two 3′ terminal nucleotides of each fragment of the siNA molecule is a 2′-deoxy-pyrimidine, such as 2′-deoxy-thymidine. In one embodiment, each strand of the siNA molecule is base-paired to the complementary nucleotides of the other strand of the siNA molecule. In one embodiment, about 15 to about 30 (e.g., about 15, 16, 17, 18, 19, 20, 21, 22, 23, 24, 25, 26, 27, 28, 29, or 30) nucleotides of the antisense strand are base-paired to the nucleotide sequence of the interleukin and/or interleukin receptor RNA or a portion thereof. In one embodiment, about 18 to about 25 (e.g., about 18, 19, 20, 21, 22, 23, 24, or 25) nucleotides of the antisense strand are base-paired to the nucleotide sequence of the interleukin and/or interleukin receptor RNA or a portion thereof.

[0074] In one embodiment, the invention features a double-stranded short interfering nucleic acid (siNA) molecule that inhibits expression of an interleukin and/or interleukin receptor gene, wherein one of the strands of the double-stranded siNA molecule is an antisense strand which comprises nucleotide sequence that is complementary to nucleotide sequence of interleukin and/or interleukin receptor RNA or a portion thereof, the other strand is a sense strand which comprises nucleotide sequence that is complementary to a nucleotide sequence of the antisense strand. In one embodiment, each strand has at least two (e.g., 2, 3, 4, 5, or more) different chemical modifications, such as nucleotide sugar, base, or backbone modifications. In one embodiment, a majority of the pyrimidine nucleotides present in the double-stranded siNA molecule comprises a sugar modification. In one embodiment, a majority of the purine nucleotides present in the double-stranded siNA molecule comprises a sugar modification. In one embodiment, the 5′-end of the antisense strand optionally includes a phosphate group.

[0075] In one embodiment, the invention features a double-stranded short interfering nucleic acid (siNA) molecule that inhibits expression of an interleukin and/or interleukin receptor gene, wherein one of the strands of the double-stranded siNA molecule is an antisense strand which comprises nucleotide sequence that is complementary to nucleotide sequence of interleukin and/or interleukin receptor RNA or a portion thereof, the other strand is a sense strand which comprises nucleotide sequence that is complementary to a nucleotide sequence of the antisense strand and wherein a majority of the pyrimidine nucleotides present in the double-stranded siNA molecule comprises a sugar modification, and wherein the nucleotide sequence or a portion thereof of the antisense strand is complementary to a nucleotide sequence of the untranslated region or a portion thereof of the interleukin and/or interleukin receptor RNA.

[0076] In one embodiment, the invention features a double-stranded short interfering nucleic acid (siNA) molecule that inhibits expression of an interleukin and/or interleukin receptor gene, wherein one of the strands of the double-stranded siNA molecule is an antisense strand which comprises nucleotide sequence that is complementary to nucleotide sequence of interleukin and/or interleukin receptor RNA or a portion thereof, wherein the other strand is a sense strand which comprises nucleotide sequence that is complementary to a nucleotide sequence of the antisense strand, wherein a majority of the pyrimidine nucleotides present in the double-stranded siNA molecule comprises a sugar modification, and wherein the nucleotide sequence of the antisense strand is complementary to a nucleotide sequence of the interleukin and/or interleukin receptor RNA or a portion thereof that is present in the interleukin and/or interleukin receptor RNA.

[0077] In one embodiment, the invention features a composition comprising a siNA molecule of the invention in a pharmaceutically acceptable carrier or diluent.

[0078] In a non-limiting example, the introduction of chemically-modified nucleotides into nucleic acid molecules provides a powerful tool in overcoming potential limitations of in vivo stability and bioavailability inherent to native RNA molecules that are delivered exogenously. For example, the use of chemically-modified nucleic acid molecules can enable a lower dose of a particular nucleic acid molecule for a given therapeutic effect since chemically-modified nucleic acid molecules tend to have a longer half-life in serum. Furthermore, certain chemical modifications can improve the bioavailability of nucleic acid molecules by targeting particular cells or tissues and/or improving cellular uptake of the nucleic acid molecule. Therefore, even if the activity of a chemically-modified nucleic acid molecule is reduced as compared to a native nucleic acid molecule, for example, when compared to an all-RNA nucleic acid molecule, the overall activity of the modified nucleic acid molecule can be greater than that of the native molecule due to improved stability and/or delivery of the molecule. Unlike native unmodified siNA, chemically-modified siNA can also minimize the possibility of activating interferon activity or immunostimulation in humans.

[0079] In any of the embodiments of siNA molecules described herein, the antisense region of a siNA molecule of the invention can comprise a phosphorothioate internucleotide linkage at the 3′-end of said antisense region. In any of the embodiments of siNA molecules described herein, the antisense region can comprise about one to about five phosphorothioate internucleotide linkages at the 5′-end of said antisense region. In any of the embodiments of siNA molecules described herein, the 3′-terminal nucleotide overhangs of a siNA molecule of the invention can comprise ribonucleotides or deoxyribonucleotides that are chemically-modified at a nucleic acid sugar, base, or backbone. In any of the embodiments of siNA molecules described herein, the 3′-terminal nucleotide overhangs can comprise one or more universal base ribonucleotides. In any of the embodiments of siNA molecules described herein, the 3′-terminal nucleotide overhangs can comprise one or more acyclic nucleotides.

[0080] One embodiment of the invention provides an expression vector comprising a nucleic acid sequence encoding at least one siNA molecule of the invention in a manner that allows expression of the nucleic acid molecule. Another embodiment of the invention provides a mammalian cell comprising such an expression vector. The mammalian cell can be a human cell. The siNA molecule of the expression vector can comprise a sense region and an antisense region. The antisense region can comprise sequence complementary to a RNA or DNA sequence encoding interleukin and/or interleukin receptor and the sense region can comprise sequence complementary to the antisense region. The siNA molecule can comprise two distinct strands having complementary sense and antisense regions. The siNA molecule can comprise a single strand having complementary sense and antisense regions.

[0081] In one embodiment, the invention features a chemically-modified short interfering nucleic acid (siNA) molecule capable of mediating RNA interference (RNAi) against interleukin and/or interleukin receptor inside a cell or reconstituted in vitro system, wherein the chemical modification comprises one or more (e.g., about 1, 2, 3, 4, 5, 6, 7, 8, 9, 10, or more) nucleotides comprising a backbone modified internucleotide linkage having Formula I:

[chemical structure]

[0082] wherein each R1 and R2 is independently any nucleotide, non-nucleotide, or polynucleotide which can be naturally-occurring or chemically-modified and which can be included in the structure of the siNA molecule or serve as a point of attachment to the siNA molecule, each X and Y is independently O, S, N, alkyl, or substituted alkyl, each Z and W is independently O, S, N, alkyl, substituted alkyl, O-alkyl, S-alkyl, alkaryl, aralkyl, or acetyl and wherein W, X, Y, and Z are optionally not all O. In another embodiment, a backbone modification of the invention comprises a phosphonoacetate and/or thiophosphonoacetate internucleotide linkage (see for example Sheehan et al., 2003, Nucleic Acids Research, 31, 4109-4118).

[0083] The chemically-modified internucleotide linkages having Formula I, for example, wherein any Z, W, X, and/or Y independently comprises a sulphur atom, can be present in one or both oligonucleotide strands of the siNA duplex, for example, in the sense strand, the antisense strand, or both strands. The siNA molecules of the invention can comprise one or more (e.g., about 1, 2, 3, 4, 5, 6, 7, 8, 9, 10, or more) chemically-modified internucleotide linkages having Formula I at the 3′-end, the 5′-end, or both of the 3′ and 5′-ends of the sense strand, the antisense strand, or both strands. For example, an exemplary siNA molecule of the invention can comprise about 1 to about 5 or more (e.g., about 1, 2, 3, 4, 5, or more) chemically-modified internucleotide linkages having Formula I at the 5′-end of the sense strand, the antisense strand, or both strands. In another non-limiting example, an exemplary siNA molecule of the invention can comprise one or more (e.g., about 1, 2, 3, 4, 5, 6, 7, 8, 9, 10, or more) pyrimidine nucleotides with chemically-modified internucleotide linkages having Formula I in the sense strand, the antisense strand, or both strands. In yet another non-limiting example, an exemplary siNA molecule of the invention can comprise one or more (e.g., about 1, 2, 3, 4, 5, 6, 7, 8, 9, 10, or more) purine nucleotides with chemically-modified internucleotide linkages having Formula I in the sense strand, the antisense strand, or both strands. In another embodiment, a siNA molecule of the invention having internucleotide linkage(s) of Formula I also comprises a chemically-modified nucleotide or non-nucleotide having any of Formulae I-VII.

[0084] In one embodiment, the invention features a chemically-modified short interfering nucleic acid (siNA) molecule capable of mediating RNA interference (RNAi) against interleukin and/or interleukin receptor inside a cell or reconstituted in vitro system, wherein the chemical modification comprises one or more (e.g., about 1, 2, 3, 4, 5, 6, 7, 8, 9, 10, or more) nucleotides or non-nucleotides having Formula II:

[chemical structure]

wherein each R3, R4, R5, R6, R7, R8, R10, R11 and R12 is independently H, OH, alkyl, substituted alkyl, alkaryl or aralkyl, F, Cl, Br, CN, CF3, OCF3, OCN, O-alkyl, S-alkyl, N-alkyl, O-alkenyl, S-alkenyl, N-alkenyl, SO-alkyl, alkyl-OSH, alkyl-OH, O-alkyl-OH, O-alkyl-SH, S-alkyl-OH, S-alkyl-SH, alkyl-5-alkyl, alkyl-O-alkyl, ONO2, NO2, N3, NH2, aminoalkyl, aminoacid, aminoacyl, ONH2, O-aminoalkyl, O-aminoacid, O-aminoacyl, heterocycloalkyl, heterocycloalkaryl, aminoalkylamino, polyalklylamino, substituted silyl, or a group having any of Formula I, II, III, IV, V, VI and/or VII, any of which can be included in the structure of the siNA molecule or serve as a point of attachment to the siNA molecule; R9 is O, S, CH2, S═O, CHF, or CF₂, and B is a nucleosidic base such as adenine, guanine, uracil, cytosine, thymine, 2-aminoadenosine, 5-methylcytosine, 2,6-diaminopurine, or any other non-naturally occurring base that can be complementary or non-complementary to target RNA or a non-nucleosidic base such as phenyl, naphthyl, 3-nitropyrrole, 5-nitroindole, nebularine, pyridone, pyridinone, or any other non-naturally occurring universal base that can be complementary or non-complementary to target RNA. In one embodiment, R3 and/or R7 comprises a conjugate moiety and a linker (e.g., a nucleotide or non-nucleotide linker as described herein or otherwise known in the art). Non-limiting examples of conjugate moieties include ligands for cellular receptors, such as peptides derived from naturally occurring protein ligands; protein localization sequences, including cellular ZIP code sequences; antibodies; nucleic acid aptamers; vitamins and other co-factors, such as folate and N-acetylgalactosamine; polymers, such as polyethyleneglycol (PEG); phospholipids; cholesterol; steroids, and polyamines, such as PEI, spermine or spermidine.

[0085] The chemically-modified nucleotide or non-nucleotide of Formula II can be present in one or both oligonucleotide strands of the siNA duplex, for example in the sense strand, the antisense strand, or both strands. The siNA molecules of the invention can comprise one or more chemically-modified nucleotides or non-nucleotides of Formula II at the 3′-end, the 5′-end, or both of the 3′ and 5′-ends of the sense strand, the antisense strand, or both strands. For example, an exemplary siNA molecule of the invention can comprise about 1 to about 5 or more (e.g., about 1, 2, 3, 4, 5, or more) chemically-modified nucleotides or non-nucleotides of Formula II at the 5′-end of the sense strand, the antisense strand, or both strands. In another non-limiting example, an exemplary siNA molecule of the invention can comprise about 1 to about 5 or more (e.g., about 1, 2, 3, 4, 5, or more) chemically-modified nucleotides or non-nucleotides of Formula II at the 3′-end of the sense strand, the antisense strand, or both strands.

[0086] In one embodiment, the invention features a chemically-modified short interfering nucleic acid (siNA) molecule capable of mediating RNA interference (RNAi) against interleukin and/or interleukin receptor inside a cell or reconstituted in vitro system, wherein the chemical modification comprises one or more (e.g., about 1, 2, 3, 4, 5, 6, 7, 8, 9, 10, or more) nucleotides or non-nucleotides having Formula III:

[chemical structure]

wherein each R3, R4, R5, R6, R7, R8, R10, R11 and R12 is independently H, OH, alkyl, substituted alkyl, alkaryl or aralkyl, F, Cl, Br, CN, CF3, OCF3, OCN, O-alkyl, S-alkyl, N-alkyl, O-alkenyl, S-alkenyl, N-alkenyl, SO-alkyl, alkyl-OSH, alkyl-OH, O-alkyl-OH, O-alkyl-SH, S-alkyl-OH, S-alkyl-SH, alkyl-5-alkyl, alkyl-O-alkyl, ONO2, NO2, N3, NH2, aminoalkyl, aminoacid, aminoacyl, ONH2, O-aminoalkyl, O-aminoacid, O-aminoacyl, heterocycloalkyl, heterocycloalkaryl, aminoalkylamino, polyalklylamino, substituted silyl, or a group having any of Formula I, II, III, IV, V, VI and/or VII, any of which can be included in the structure of the siNA molecule or serve as a point of attachment to the siNA molecule; R9 is O, S, CH2, S═O, CHF, or CF2, and B is a nucleosidic base such as adenine, guanine, uracil, cytosine, thymine, 2-aminoadenosine, 5-methylcytosine, 2,6-diaminopurine, or any other non-naturally occurring base that can be employed to be complementary or non-complementary to target RNA or a non-nucleosidic base such as phenyl, naphthyl, 3-nitropyrrole, 5-nitroindole, nebularine, pyridone, pyridinone, or any other non-naturally occurring universal base that can be complementary or non-complementary to target RNA. In one embodiment, R3 and/or R7 comprises a conjugate moiety and a linker (e.g., a nucleotide or non-nucleotide linker as described herein or otherwise known in the art). Non-limiting examples of conjugate moieties include ligands for cellular receptors, such as peptides derived from naturally occurring protein ligands; protein localization sequences, including cellular ZIP code sequences; antibodies; nucleic acid aptamers; vitamins and other co-factors, such as folate and N-acetylgalactosamine; polymers, such as polyethyleneglycol (PEG); phospholipids; cholesterol; steroids, and polyamines, such as PEI, spermine or spermidine.

[0087] The chemically-modified nucleotide or non-nucleotide of Formula III can be present in one or both oligonucleotide strands of the siNA duplex, for example, in the sense strand, the antisense strand, or both strands. The siNA molecules of the invention can comprise one or more chemically-modified nucleotides or non-nucleotides of Formula III at the 3′-end, the 5′-end, or both of the 3′ and 5′-ends of the sense strand, the antisense strand, or both strands. For example, an exemplary siNA molecule of the invention can comprise about 1 to about 5 or more (e.g., about 1, 2, 3, 4, 5, or more) chemically-modified nucleotide(s) or non-nucleotide(s) of Formula III at the 5′-end of the sense strand, the antisense strand, or both strands. In another non-limiting example, an exemplary siNA molecule of the invention can comprise about 1 to about 5 or more (e.g., about 1, 2, 3, 4, 5, or more) chemically-modified nucleotide or non-nucleotide of Formula III at the 3′-end of the sense strand, the antisense strand, or both strands.

[0088] In another embodiment, a siNA molecule of the invention comprises a nucleotide having Formula II or III, wherein the nucleotide having Formula II or III is in an inverted configuration. For example, the nucleotide having Formula II or III is connected to the siNA construct in a 3′-3′,3′-2′,2′-3′, or 5′-5′ configuration, such as at the 3′-end, the 5′-end, or both of the 3′ and 5′-ends of one or both siNA strands.

[0089] In one embodiment, the invention features a chemically-modified short interfering nucleic acid (siNA) molecule capable of mediating RNA interference (RNAi) against interleukin and/or interleukin receptor inside a cell or reconstituted in vitro system, wherein the chemical modification comprises a 5′-terminal phosphate group having Formula IV:

[chemical structure]

wherein each X and Y is independently O, S, N, alkyl, substituted alkyl, or alkylhalo; wherein each Z and W is independently O, S, N, alkyl, substituted alkyl, O-alkyl, S-alkyl, alkaryl, aralkyl, alkylhalo, or acetyl; and wherein W, X, Y and Z are optionally not all 0 and Y serves as a point of attachment to the siNA molecule.

[0090] In one embodiment, the invention features a siNA molecule having a 5′-terminal phosphate group having Formula IV on the target-complementary strand, for example, a strand complementary to a target RNA, wherein the siNA molecule comprises an all RNA siNA molecule. In another embodiment, the invention features a siNA molecule having a 5′-terminal phosphate group having Formula IV on the target-complementary strand wherein the siNA molecule also comprises about 1 to about 3 (e.g., about 1, 2, or 3) nucleotide 3′-terminal nucleotide overhangs having about 1 to about 4 (e.g., about 1, 2, 3, or 4) deoxyribonucleotides on the 3′-end of one or both strands. In another embodiment, a 5′-terminal phosphate group having Formula IV is present on the target-complementary strand of a siNA molecule of the invention, for example a siNA molecule having chemical modifications having any of Formulae I-VII.

[0091] In one embodiment, the invention features a chemically-modified short interfering nucleic acid (siNA) molecule capable of mediating RNA interference (RNAi) against interleukin and/or interleukin receptor inside a cell or reconstituted in vitro system, wherein the chemical modification comprises one or more phosphorothioate internucleotide linkages. For example, in a non-limiting example, the invention features a chemically-modified short interfering nucleic acid (siNA) having about 1, 2, 3, 4, 5, 6, 7, 8 or more phosphorothioate internucleotide linkages in one siNA strand. In yet another embodiment, the invention features a chemically-modified short interfering nucleic acid (siNA) individually having about 1, 2, 3, 4, 5, 6, 7, 8 or more phosphorothioate internucleotide linkages in both siNA strands. The phosphorothioate internucleotide linkages can be present in one or both oligonucleotide strands of the siNA duplex, for example in the sense strand, the antisense strand, or both strands. The siNA molecules of the invention can comprise one or more phosphorothioate internucleotide linkages at the 3′-end, the 5′-end, or both of the 3′- and 5′-ends of the sense strand, the antisense strand, or both strands. For example, an exemplary siNA molecule of the invention can comprise about 1 to about 5 or more (e.g., about 1, 2, 3, 4, 5, or more) consecutive phosphorothioate internucleotide linkages at the 5′-end of the sense strand, the antisense strand, or both strands. In another non-limiting example, an exemplary siNA molecule of the invention can comprise one or more (e.g., about 1, 2, 3, 4, 5, 6, 7, 8, 9, 10, or more) pyrimidine phosphorothioate internucleotide linkages in the sense strand, the antisense strand, or both strands. In yet another non-limiting example, an exemplary siNA molecule of the invention can comprise one or more (e.g., about 1, 2, 3, 4, 5, 6, 7, 8, 9, 10, or more) purine phosphorothioate internucleotide linkages in the sense strand, the antisense strand, or both strands.

[0092] Each strand of the double stranded siNA molecule can have one or more chemical modifications such that each strand comprises a different pattern of chemical modifications. Several non-limiting examples of modification schemes that could give rise to different patterns of modifications are provided herein (see for example Stab chemistries shown in Table IV, and double stranded nucleic acid molecules having any of SI, SII, SIII, SIV, SV, and/or SVI).

[0093] In one embodiment, the invention features a siNA molecule, wherein the sense strand comprises one or more, for example, about 1, 2, 3, 4, 5, 6, 7, 8, 9, 10, or more phosphorothioate internucleotide linkages, and/or one or more (e.g., about 1, 2, 3, 4, 5, 6, 7, 8, 9, 10 or more) 2′-deoxy, 2′-O-methyl, 2′-deoxy-2′-fluoro, 2′-O-trifluoromethyl, 2′-O-ethyl-trifluoromethoxy, 2′-O-difluoromethoxy-ethoxy and/or about one or more (e.g., about 1, 2, 3, 4, 5, 6, 7, 8, 9, 10 or more) universal base modified nucleotides, and optionally a terminal cap molecule at the 3′-end, the 5′-end, or both of the 3′- and 5′-ends of the sense strand; and wherein the antisense strand comprises about 1 to about 10 or more, specifically about 1, 2, 3, 4, 5, 6, 7, 8, 9, 10, or more phosphorothioate internucleotide linkages, and/or one or more (e.g., about 1, 2, 3, 4, 5, 6, 7, 8, 9, 10 or more) 2′-deoxy, 2′-O-methyl, 2′-deoxy-2′-fluoro, 2′-O-trifluoromethyl, 2′-O-ethyl-trifluoromethoxy, 2′-O-difluoromethoxy-ethoxy, 4′-thio and/or one or more (e.g., about 1, 2, 3, 4, 5, 6, 7, 8, 9, 10 or more) universal base modified nucleotides, and optionally a terminal cap molecule at the 3′-end, the 5′-end, or both of the 3′- and 5′-ends of the antisense strand. In another embodiment, one or more, for example about 1, 2, 3, 4, 5, 6, 7, 8, 9, 10, or more, pyrimidine nucleotides of the sense and/or antisense siNA strand are chemically-modified with 2′-deoxy, 2′-O-methyl, 2′-O-trifluoromethyl, 2′-O-ethyl-trifluoromethoxy, 2′-O-difluoromethoxy-ethoxy, 4′-thio and/or 2′-deoxy-2′-fluoro nucleotides, with or without one or more, for example about 1, 2, 3, 4, 5, 6, 7, 8, 9, 10, or more, phosphorothioate internucleotide linkages and/or a terminal cap molecule at the 3′-end, the 5′-end, or both of the 3′- and 5′-ends, being present in the same or different strand.

[0094] In another embodiment, the invention features a siNA molecule, wherein the sense strand comprises about 1 to about 5, specifically about 1, 2, 3, 4, or 5 phosphorothioate internucleotide linkages, and/or one or more (e.g., about 1, 2, 3, 4, 5, or more) 2′-deoxy, 2′-O-methyl, 2′-deoxy-2′-fluoro, 2′-O-trifluoromethyl, 2′-O-ethyl-trifluoromethoxy, 2′-O-difluoromethoxy-ethoxy, 4′-thio and/or one or more (e.g., about 1, 2, 3, 4, 5, or more) universal base modified nucleotides, and optionally a terminal cap molecule at the 3-end, the 5′-end, or both of the 3′- and 5′-ends of the sense strand; and wherein the antisense strand comprises about 1 to about 5 or more, specifically about 1, 2, 3, 4, 5, or more phosphorothioate internucleotide linkages, and/or one or more (e.g., about 1, 2, 3, 4, 5, 6, 7, 8, 9, 10 or more) 2′-deoxy, 2′-O-methyl, 2′-deoxy-2′-fluoro, 2′-O-trifluoromethyl, 2′-O-ethyl-trifluoromethoxy, 2′-O-difluoromethoxy-ethoxy, 4′-thio and/or one or more (e.g., about 1, 2, 3, 4, 5, 6, 7, 8, 9, 10 or more) universal base modified nucleotides, and optionally a terminal cap molecule at the 3′-end, the 5′-end, or both of the 3′- and 5′-ends of the antisense strand. In another embodiment, one or more, for example about 1, 2, 3, 4, 5, 6, 7, 8, 9, 10, or more, pyrimidine nucleotides of the sense and/or antisense siNA strand are chemically-modified with 2′-deoxy, 2′-O-methyl, 2′-O-trifluoromethyl, 2′-O-ethyl-trifluoromethoxy, 2′-O-difluoromethoxy-ethoxy, 4′-thio and/or 2′-deoxy-2′-fluoro nucleotides, with or without about 1 to about 5 or more, for example about 1, 2, 3, 4, 5, or more phosphorothioate internucleotide linkages and/or a terminal cap molecule at the 3′-end, the 5′-end, or both of the 3′- and 5′-ends, being present in the same or different strand.

[0095] In one embodiment, the invention features a siNA molecule, wherein the antisense strand comprises one or more, for example, about 1, 2, 3, 4, 5, 6, 7, 8, 9, 10, or more phosphorothioate internucleotide linkages, and/or about one or more (e.g., about 1, 2, 3, 4, 5, 6, 7, 8, 9, 10 or more) 2′-deoxy, 2′-O-methyl, 2′-deoxy-2′-fluoro, 2′-O-trifluoromethyl, 2′-O-ethyl-trifluoromethoxy, 2′-O-difluoromethoxy-ethoxy, 4′-thio and/or one or more (e.g., about 1, 2, 3, 4, 5, 6, 7, 8, 9, 10 or more) universal base modified nucleotides, and optionally a terminal cap molecule at the 3′-end, the 5′-end, or both of the 3′- and 5′-ends of the sense strand; and wherein the antisense strand comprises about 1 to about 10 or more, specifically about 1, 2, 3, 4, 5, 6, 7, 8, 9, 10 or more phosphorothioate internucleotide linkages, and/or one or more (e.g., about 1, 2, 3, 4, 5, 6, 7, 8, 9, 10 or more) 2′-deoxy, 2′-O-methyl, 2′-deoxy-2′-fluoro, 2′-O-trifluoromethyl, 2′-O-ethyl-trifluoromethoxy, 2′-O-difluoromethoxy-ethoxy, 4′-thio and/or one or more (e.g., about 1, 2, 3, 4, 5, 6, 7, 8, 9, 10 or more) universal base modified nucleotides, and optionally a terminal cap molecule at the 3′-end, the 5′-end, or both of the 3′- and 5′-ends of the antisense strand. In another embodiment, one or more, for example about 1, 2, 3, 4, 5, 6, 7, 8, 9, 10 or more pyrimidine nucleotides of the sense and/or antisense siNA strand are chemically-modified with 2′-deoxy, 2′-O-methyl, 2′-O-trifluoromethyl, 2′-O-ethyl-trifluoromethoxy, 2′-O-difluoromethoxy-ethoxy, 4′-thio and/or 2′-deoxy-2′-fluoro nucleotides, with or without one or more, for example, about 1, 2, 3, 4, 5, 6, 7, 8, 9, 10 or more phosphorothioate internucleotide linkages and/or a terminal cap molecule at the 3′-end, the 5′-end, or both of the 3′ and 5′-ends, being present in the same or different strand.

[0096] In another embodiment, the invention features a siNA molecule, wherein the antisense strand comprises about 1 to about 5 or more, specifically about 1, 2, 3, 4, 5 or more phosphorothioate internucleotide linkages, and/or one or more (e.g., about 1, 2, 3, 4, 5, 6, 7, 8, 9, 10 or more) 2′-deoxy, 2′-O-methyl, 2′-deoxy-2′-fluoro, 2′-O-trifluoromethyl, 2′-O-ethyl-trifluoromethoxy, 2′-O-difluoromethoxy-ethoxy, 4′-thio and/or one or more (e.g., about 1, 2, 3, 4, 5, 6, 7, 8, 9, 10 or more) universal base modified nucleotides, and optionally a terminal cap molecule at the 3′-end, the 5′-end, or both of the 3′- and 5′-ends of the sense strand; and wherein the antisense strand comprises about 1 to about 5 or more, specifically about 1, 2, 3, 4, 5 or more phosphorothioate internucleotide linkages, and/or one or more (e.g., about 1, 2, 3, 4, 5, 6, 7, 8, 9, 10 or more) 2′-deoxy, 2′-O-methyl, 2′-deoxy-2′-fluoro, 2′-O-trifluoromethyl, 2′-O-ethyl-trifluoromethoxy, 2′-O-difluoromethoxy-ethoxy, 4′-thio and/or one or more (e.g., about 1, 2, 3, 4, 5, 6, 7, 8, 9, 10 or more) universal base modified nucleotides, and optionally a terminal cap molecule at the 3′-end, the 5′-end, or both of the 3′- and 5′-ends of the antisense strand. In another embodiment, one or more, for example about 1, 2, 3, 4, 5, 6, 7, 8, 9, 10 or more pyrimidine nucleotides of the sense and/or antisense siNA strand are chemically-modified with 2′-deoxy, 2′-O-methyl, 2′-O-trifluoromethyl, 2′-O-ethyl-trifluoromethoxy, 2′-O-difluoromethoxy-ethoxy, 4′-thio and/or 2′-deoxy-2′-fluoro nucleotides, with or without about 1 to about 5, for example about 1, 2, 3, 4, 5 or more phosphorothioate internucleotide linkages and/or a terminal cap molecule at the 3′-end, the 5′-end, or both of the 3′- and 5′-ends, being present in the same or different strand.

[0097] In one embodiment, the invention features a chemically-modified short interfering nucleic acid (siNA) molecule having about 1 to about 5 or more (specifically about 1, 2, 3, 4, 5 or more) phosphorothioate internucleotide linkages in each strand of the siNA molecule.

[0098] In another embodiment, the invention features a siNA molecule comprising 2′-5′ internucleotide linkages. The 2′-5′ internucleotide linkage(s) can be at the 3′-end, the 5′-end, or both of the 3′- and 5′-ends of one or both siNA sequence strands. In addition, the 2′-5′ internucleotide linkage(s) can be present at various other positions within one or both siNA sequence strands, for example, about 1, 2, 3, 4, 5, 6, 7, 8, 9, 10, or more including every internucleotide linkage of a pyrimidine nucleotide in one or both strands of the siNA molecule can comprise a 2′-5′ internucleotide linkage, or about 1, 2, 3, 4, 5, 6, 7, 8, 9, 10, or more including every internucleotide linkage of a purine nucleotide in one or both strands of the siNA molecule can comprise a 2′-5′ internucleotide linkage.

[0099] In another embodiment, a chemically-modified siNA molecule of the invention comprises a duplex having two strands, one or both of which can be chemically-modified, wherein each strand is independently about 15 to about 30 (e.g., about 15, 16, 17, 18, 19, 20, 21, 22, 23, 24, 25, 26, 27, 28, 29, or 30) nucleotides in length, wherein the duplex has about 15 to about 30 (e.g., about 15, 16, 17, 18, 19, 20, 21, 22, 23, 24, 25, 26, 27, 28, 29, or 30) base pairs, and wherein the chemical modification comprises a structure having any of Formulae I-VII. For example, an exemplary chemically-modified siNA molecule of the invention comprises a duplex having two strands, one or both of which can be chemically-modified with a chemical modification having any of Formulae I-VII or any combination thereof, wherein each strand consists of about 21 nucleotides, each having a 2-nucleotide 3′-terminal nucleotide overhang, and wherein the duplex has about 19 base pairs. In another embodiment, a siNA molecule of the invention comprises a single stranded hairpin structure, wherein the siNA is about 36 to about 70 (e.g., about 36, 40, 45, 50, 55, 60, 65, or 70) nucleotides in length having about 15 to about 30 (e.g., about 15, 16, 17, 18, 19, 20, 21, 22, 23, 24, 25, 26, 27, 28, 29, or 30) base pairs, and wherein the siNA can include a chemical modification comprising a structure having any of Formulae I-VII or any combination thereof. For example, an exemplary chemically-modified siNA molecule of the invention comprises a linear oligonucleotide having about 42 to about 50 (e.g., about 42, 43, 44, 45, 46, 47, 48, 49, or 50) nucleotides that is chemically-modified with a chemical modification having any of Formulae I-VII or any combination thereof, wherein the linear oligonucleotide forms a hairpin structure having about 19 to about 21 (e.g., 19, 20, or 21) base pairs and a 2-nucleotide 3′-terminal nucleotide overhang. In another embodiment, a linear hairpin siNA molecule of the invention contains a stem loop motif, wherein the loop portion of the siNA molecule is biodegradable. For example, a linear hairpin siNA molecule of the invention is designed such that degradation of the loop portion of the siNA molecule in vivo can generate a double-stranded siNA molecule with 3′-terminal overhangs, such as 3′-terminal nucleotide overhangs comprising about 2 nucleotides.

[0100] In another embodiment, a siNA molecule of the invention comprises a hairpin structure, wherein the siNA is about 25 to about 50 (e.g., about 25, 26, 27, 28, 29, 30, 31, 32, 33, 34, 35, 36, 37, 38, 39, 40, 41, 42, 43, 44, 45, 46, 47, 48, 49, or 50) nucleotides in length having about 3 to about 25 (e.g., about 3, 4, 5, 6, 7, 8, 9, 10, 11, 12, 13, 14, 15, 16, 17, 18, 19, 20, 21, 22, 23, 24, or 25) base pairs, and wherein the siNA can include one or more chemical modifications comprising a structure having any of Formulae I-VII or any combination thereof. For example, an exemplary chemically-modified siNA molecule of the invention comprises a linear oligonucleotide having about 25 to about 35 (e.g., about 25, 26, 27, 28, 29, 30, 31, 32, 33, 34, or 35) nucleotides that is chemically-modified with one or more chemical modifications having any of Formulae I-VII or any combination thereof, wherein the linear oligonucleotide forms a hairpin structure having about 3 to about 25 (e.g., about 3, 4, 5, 6, 7, 8, 9, 10, 11, 12, 13, 14, 15, 16, 17, 18, 19, 20, 21, 22, 23, 24, or 25) base pairs and a 5′-terminal phosphate group that can be chemically modified as described herein (for example a 5′-terminal phosphate group having Formula IV). In another embodiment, a linear hairpin siNA molecule of the invention contains a stem loop motif, wherein the loop portion of the siNA molecule is biodegradable. In one embodiment, a linear hairpin siNA molecule of the invention comprises a loop portion comprising a non-nucleotide linker.

[0101] In another embodiment, a siNA molecule of the invention comprises an asymmetric hairpin structure, wherein the siNA is about 25 to about 50 (e.g., about 25, 26, 27, 28, 29, 30, 31, 32, 33, 34, 35, 36, 37, 38, 39, 40, 41, 42, 43, 44, 45, 46, 47, 48, 49, or 50) nucleotides in length having about 3 to about 25 (e.g., about 3, 4, 5, 6, 7, 8, 9, 10, 11, 12, 13, 14, 15, 16, 17, 18, 19, 20, 21, 22, 23, 24, or 25) base pairs, and wherein the siNA can include one or more chemical modifications comprising a structure having any of Formulae I-VII or any combination thereof. For example, an exemplary chemically-modified siNA molecule of the invention comprises a linear oligonucleotide having about 25 to about 35 (e.g., about 25, 26, 27, 28, 29, 30, 31, 32, 33, 34, or 35) nucleotides that is chemically-modified with one or more chemical modifications having any of Formulae I-VII or any combination thereof, wherein the linear oligonucleotide forms an asymmetric hairpin structure having about 3 to about 25 (e.g., about 3, 4, 5, 6, 7, 8, 9, 10, 11, 12, 13, 14, 15, 16, 17, 18, 19, 20, 21, 22, 23, 24, or 25) base pairs and a 5′-terminal phosphate group that can be chemically modified as described herein (for example a 5′-terminal phosphate group having Formula IV). In one embodiment, an asymmetric hairpin siNA molecule of the invention contains a stem loop motif, wherein the loop portion of the siNA molecule is biodegradable. In another embodiment, an asymmetric hairpin siNA molecule of the invention comprises a loop portion comprising a non-nucleotide linker.

[0102] In another embodiment, a siNA molecule of the invention comprises an asymmetric double stranded structure having separate polynucleotide strands comprising sense and antisense regions, wherein the antisense region is about 15 to about 30 (e.g., about 15, 16, 17, 18, 19, 20, 21, 22, 23, 24, 25, 26, 27, 28, 29, or 30) nucleotides in length, wherein the sense region is about 3 to about 25 (e.g., about 3, 4, 5, 6, 7, 8, 9, 10, 11, 12, 13, 14, 15, 16, 17, 18, 19, 20, 21, 22, 23, 24, or 25) nucleotides in length, wherein the sense region and the antisense region have at least 3 complementary nucleotides, and wherein the siNA can include one or more chemical modifications comprising a structure having any of Formulae I-VII or any combination thereof. For example, an exemplary chemically-modified siNA molecule of the invention comprises an asymmetric double stranded structure having separate polynucleotide strands comprising sense and antisense regions, wherein the antisense region is about 18 to about 23 (e.g., about 18, 19, 20, 21, 22, or 23) nucleotides in length and wherein the sense region is about 3 to about 15 (e.g., about 3, 4, 5, 6, 7, 8, 9, 10, 11, 12, 13, 14, or 15) nucleotides in length, wherein the sense region the antisense region have at least 3 complementary nucleotides, and wherein the siNA can include one or more chemical modifications comprising a structure having any of Formulae I-VII or any combination thereof. In another embodiment, the asymmetric double stranded siNA molecule can also have a 5′-terminal phosphate group that can be chemically modified as described herein (for example a 5′-terminal phosphate group having Formula IV).

[0103] In another embodiment, a siNA molecule of the invention comprises a circular nucleic acid molecule, wherein the siNA is about 38 to about 70 (e.g., about 38, 40, 45, 50, 55, 60, 65, or 70) nucleotides in length having about 15 to about 30 (e.g., about 15, 16, 17, 18, 19, 20, 21, 22, 23, 24, 25, 26, 27, 28, 29, or 30) base pairs, and wherein the siNA can include a chemical modification, which comprises a structure having any of Formulae I-VII or any combination thereof. For example, an exemplary chemically-modified siNA molecule of the invention comprises a circular oligonucleotide having about 42 to about 50 (e.g., about 42, 43, 44, 45, 46, 47, 48, 49, or 50) nucleotides that is chemically-modified with a chemical modification having any of Formulae I-VII or any combination thereof, wherein the circular oligonucleotide forms a dumbbell shaped structure having about 19 base pairs and 2 loops.

[0104] In another embodiment, a circular siNA molecule of the invention contains two loop motifs, wherein one or both loop portions of the siNA molecule is biodegradable. For example, a circular siNA molecule of the invention is designed such that degradation of the loop portions of the siNA molecule in vivo can generate a double-stranded siNA molecule with 3′-terminal overhangs, such as 3′-terminal nucleotide overhangs comprising about 2 nucleotides.

[0105] In one embodiment, a siNA molecule of the invention comprises at least one (e.g., about 1, 2, 3, 4, 5, 6, 7, 8, 9, 10, or more) abasic moiety, for example a compound having Formula V:

[chemical structure]

wherein each R3, R4, R5, R6, R7, R8, R10, R11, R12, and R13 is independently H, OH, alkyl, substituted alkyl, alkaryl or aralkyl, F, Cl, Br, CN, CF₃, OCF3, OCN, O-alkyl, S-alkyl, N-alkyl, O-alkenyl, S-alkenyl, N-alkenyl, SO-alkyl, alkyl-OSH, alkyl-OH, O-alkyl-OH, O-alkyl-SH, S-alkyl-OH, S-alkyl-SH, alkyl-5-alkyl, alkyl-O-alkyl, ONO2, NO2, N3, NH2, aminoalkyl, aminoacid, aminoacyl, ONH2, O-aminoalkyl, O-aminoacid, O-aminoacyl, heterocycloalkyl, heterocycloalkaryl, aminoalkylamino, polyalklylamino, substituted silyl, or a group having any of Formula I, II, III, IV, V, VI and/or VII, any of which can be included in the structure of the siNA molecule or serve as a point of attachment to the siNA molecule; R9 is O, S, CH2, S═O, CHF, or CF2. In one embodiment, R3 and/or R7 comprises a conjugate moiety and a linker (e.g., a nucleotide or non-nucleotide linker as described herein or otherwise known in the art). Non-limiting examples of conjugate moieties include ligands for cellular receptors, such as peptides derived from naturally occurring protein ligands; protein localization sequences, including cellular ZIP code sequences; antibodies; nucleic acid aptamers; vitamins and other co-factors, such as folate and N-acetylgalactosamine; polymers, such as polyethyleneglycol (PEG); phospholipids; cholesterol; steroids, and polyamines, such as PEI, spermine or spermidine.

[0106] In one embodiment, a siNA molecule of the invention comprises at least one (e.g., about 1, 2, 3, 4, 5, 6, 7, 8, 9, 10, or more) inverted abasic moiety, for example a compound having Formula VI:

[chemical structure]

wherein each R3, R4, R5, R6, R7, R8, R10, R11, R12, and R13 is independently H, OH, alkyl, substituted alkyl, alkaryl or aralkyl, F, Cl, Br, CN, CF3, OCF3, OCN, O-alkyl, S-alkyl, N-alkyl, O-alkenyl, S-alkenyl, N-alkenyl, SO-alkyl, alkyl-OSH, alkyl-OH, O-alkyl-OH, O-alkyl-SH, S-alkyl-OH, S-alkyl-SH, alkyl-5-alkyl, alkyl-O-alkyl, ONO2, NO2, N3, NH2, aminoalkyl, aminoacid, aminoacyl, ONH2, O-aminoalkyl, O-aminoacid, O-aminoacyl, heterocycloalkyl, heterocycloalkaryl, aminoalkylamino, polyalklylamino, substituted silyl, or a group having any of Formula I, II, III, IV, V, VI and/or VII, any of which can be included in the structure of the siNA molecule or serve as a point of attachment to the siNA molecule; R9 is O, S, CH2, S═O, CHF, or CF2, and either R2, R3, R8 or R13 serve as points of attachment to the siNA molecule of the invention. In one embodiment, R3 and/or R7 comprises a conjugate moiety and a linker (e.g., a nucleotide or non-nucleotide linker as described herein or otherwise known in the art). Non-limiting examples of conjugate moieties include ligands for cellular receptors, such as peptides derived from naturally occurring protein ligands; protein localization sequences, including cellular ZIP code sequences; antibodies; nucleic acid aptamers; vitamins and other co-factors, such as folate and N-acetylgalactosamine; polymers, such as polyethyleneglycol (PEG); phospholipids; cholesterol; steroids, and polyamines, such as PEI, spermine or spermidine.

[0107] In another embodiment, a siNA molecule of the invention comprises at least one (e.g., about 1, 2, 3, 4, 5, 6, 7, 8, 9, 10, or more) substituted polyalkyl moieties, for example a compound having Formula VII:

[chemical structure]

wherein each n is independently an integer from 1 to 12, each R1, R2 and R3 is independently H, OH, alkyl, substituted alkyl, alkaryl or aralkyl, F, Cl, Br, CN, CF3, OCF3, OCN, O-alkyl, S-alkyl, N-alkyl, O-alkenyl, S-alkenyl, N-alkenyl, SO-alkyl, alkyl-OSH, alkyl-OH, O-alkyl-OH, O-alkyl-SH, S-alkyl-OH, S-alkyl-SH, alkyl-5-alkyl, alkyl-O-alkyl, ONO2, NO2, N3, NH2, aminoalkyl, aminoacid, aminoacyl, ONH2, O-aminoalkyl, O-aminoacid, O-aminoacyl, heterocycloalkyl, heterocycloalkaryl, aminoalkylamino, polyalklylamino, substituted silyl, or a group having any of Formula I, II, III, IV, V, VI and/or VII, any of which can be included in the structure of the siNA molecule or serve as a point of attachment to the siNA molecule. In one embodiment, R3 and/or R1 comprises a conjugate moiety and a linker (e.g., a nucleotide or non-nucleotide linker as described herein or otherwise known in the art). Non-limiting examples of conjugate moieties include ligands for cellular receptors, such as peptides derived from naturally occurring protein ligands; protein localization sequences, including cellular ZIP code sequences; antibodies; nucleic acid aptamers; vitamins and other co-factors, such as folate and N-acetylgalactosamine; polymers, such as polyethyleneglycol (PEG); phospholipids; cholesterol; steroids, and polyamines, such as PEI, spermine or spermidine.

[0108] By “ZIP code” sequences is meant, any peptide or protein sequence that is involved in cellular topogenic signaling mediated transport (see for example Ray et al., 2004, Science, 306(1501): 1505)

[0109] Each nucleotide within the double stranded siNA molecule can independently have a chemical modification comprising the structure of any of Formulae I-VIII. Thus, in one embodiment, one or more nucleotide positions of a siNA molecule of the invention comprises a chemical modification having structure of any of Formulae I-VII or any other modification herein. In one embodiment, each nucleotide position of a siNA molecule of the invention comprises a chemical modification having structure of any of Formulae I-VII or any other modification herein.

[0110] In one embodiment, one or more nucleotide positions of one or both strands of a double stranded siNA molecule of the invention comprises a chemical modification having structure of any of Formulae I-VII or any other modification herein. In one embodiment, each nucleotide position of one or both strands of a double stranded siNA molecule of the invention comprises a chemical modification having structure of any of Formulae I-VII or any other modification herein.

[0111] In another embodiment, the invention features a compound having Formula VII, wherein R1 and R2 are hydroxyl (OH) groups, n=1, and R3 comprises 0 and is the point of attachment to the 3′-end, the 5′-end, or both of the 3′ and 5′-ends of one or both strands of a double-stranded siNA molecule of the invention or to a single-stranded siNA molecule of the invention. This modification is referred to herein as “glyceryl” (for example modification 6 in FIG. 10).

[0112] In another embodiment, a chemically modified nucleoside or non-nucleoside (e.g. a moiety having any of Formula V, VI or VII) of the invention is at the 3′-end, the 5′-end, or both of the 3′ and 5′-ends of a siNA molecule of the invention. For example, chemically modified nucleoside or non-nucleoside (e.g., a moiety having Formula V, VI or VII) can be present at the 3′-end, the 5′-end, or both of the 3′ and 5′-ends of the antisense strand, the sense strand, or both antisense and sense strands of the siNA molecule. In one embodiment, the chemically modified nucleoside or non-nucleoside (e.g., a moiety having Formula V, VI or VII) is present at the 5′-end and 3′-end of the sense strand and the 3′-end of the antisense strand of a double stranded siNA molecule of the invention. In one embodiment, the chemically modified nucleoside or non-nucleoside (e.g., a moiety having Formula V, VI or VII) is present at the terminal position of the 5′-end and 3′-end of the sense strand and the 3′-end of the antisense strand of a double stranded siNA molecule of the invention. In one embodiment, the chemically modified nucleoside or non-nucleoside (e.g., a moiety having Formula V, VI or VII) is present at the two terminal positions of the 5′-end and 3′-end of the sense strand and the 3′-end of the antisense strand of a double stranded siNA molecule of the invention. In one embodiment, the chemically modified nucleoside or non-nucleoside (e.g., a moiety having Formula V, VI or VII) is present at the penultimate position of the 5′-end and 3′-end of the sense strand and the 3′-end of the antisense strand of a double stranded siNA molecule of the invention. In addition, a moiety having Formula VII can be present at the 3′-end or the 5′-end of a hairpin siNA molecule as described herein.

[0113] In another embodiment, a siNA molecule of the invention comprises an abasic residue having Formula V or VI, wherein the abasic residue having Formula VI or VI is connected to the siNA construct in a 3′-3′,3′-2′,2′-3′, or 5′-5′ configuration, such as at the 3′-end, the 5′-end, or both of the 3′ and 5′-ends of one or both siNA strands.

[0114] In one embodiment, a siNA molecule of the invention comprises one or more (e.g., about 1, 2, 3, 4, 5, 6, 7, 8, 9, 10, or more) locked nucleic acid (LNA) nucleotides, for example, at the 5′-end, the 3′-end, both of the 5′ and 3′-ends, or any combination thereof, of the siNA molecule.

[0115] In one embodiment, a siNA molecule of the invention comprises one or more (e.g., about 1, 2, 3, 4, 5, 6, 7, 8, 9, 10, or more) 4′-thio nucleotides, for example, at the 5′-end, the 3′-end, both of the 5′ and 3′-ends, or any combination thereof, of the siNA molecule.

[0116] In another embodiment, a siNA molecule of the invention comprises one or more (e.g., about 1, 2, 3, 4, 5, 6, 7, 8, 9, 10, or more) acyclic nucleotides, for example, at the 5′-end, the 3′-end, both of the 5′ and 3′-ends, or any combination thereof, of the siNA molecule.

[0117] In one embodiment, the invention features a chemically-modified short interfering nucleic acid (siNA) molecule of the invention comprising a sense region, wherein any (e.g., one or more or all) pyrimidine nucleotides present in the sense region are 2′-deoxy-2′-fluoro pyrimidine nucleotides (e.g., wherein all pyrimidine nucleotides are 2′-deoxy-2′-fluoro pyrimidine nucleotides or alternately a plurality of pyrimidine nucleotides are 2′-deoxy-2′-fluoro pyrimidine nucleotides), and wherein any (e.g., one or more or all) purine nucleotides present in the sense region are 2′-deoxy purine nucleotides (e.g., wherein all purine nucleotides are 2′-deoxy purine nucleotides or alternately a plurality of purine nucleotides are 2′-deoxy purine nucleotides).

[0118] In one embodiment, the invention features a chemically-modified short interfering nucleic acid (siNA) molecule of the invention comprising a sense region, wherein any (e.g., one or more or all) pyrimidine nucleotides present in the sense region are 2′-deoxy-2′-fluoro, 4′-thio, 2′-O-trifluoromethyl, 2′-O-ethyl-trifluoromethoxy, or 2′-O-difluoromethoxy-ethoxy pyrimidine nucleotides (e.g., wherein all pyrimidine nucleotides are 2′-deoxy-2′-fluoro, 4′-thio, 2′-O-trifluoromethyl, 2′-O-ethyl-trifluoromethoxy, or 2′-O-difluoromethoxy-ethoxy pyrimidine nucleotides or alternately a plurality of pyrimidine nucleotides are 2′-deoxy-2′-fluoro, 4′-thio, 2′-O-trifluoromethyl, 2′-O-ethyl-trifluoromethoxy, or 2′-O-difluoromethoxy-ethoxy pyrimidine nucleotides), and wherein any (e.g., one or more or all) purine nucleotides present in the sense region are 2′-deoxy purine nucleotides (e.g., wherein all purine nucleotides are 2′-deoxy purine nucleotides or alternately a plurality of purine nucleotides are 2′-deoxy purine nucleotides), wherein any nucleotides comprising a 3′-terminal nucleotide overhang that are present in said sense region are 2′-deoxy nucleotides.

[0119] In one embodiment, the invention features a chemically-modified short interfering nucleic acid (siNA) molecule of the invention comprising a sense region, wherein any (e.g., one or more or all) pyrimidine nucleotides present in the sense region are 2′-deoxy-2′-fluoro, 4′-thio, 2′-O-trifluoromethyl, 2′-O-ethyl-trifluoromethoxy, or 2′-O-difluoromethoxy-ethoxy pyrimidine nucleotides (e.g., wherein all pyrimidine nucleotides are 2′-deoxy-2′-fluoro, 4′-thio, 2′-O-trifluoromethyl, 2′-O-ethyl-trifluoromethoxy, or 2′-O-difluoromethoxy-ethoxy pyrimidine nucleotides or alternately a plurality of pyrimidine nucleotides are 2′-deoxy-2′-fluoro, 4′-thio, 2′-O-trifluoromethyl, 2′-O-ethyl-trifluoromethoxy, or 2′-O-difluoromethoxy-ethoxy pyrimidine nucleotides), and wherein any (e.g., one or more or all) purine nucleotides present in the sense region are 2′-O-methyl purine nucleotides (e.g., wherein all purine nucleotides are 2′-O-methyl, 4′-thio, 2′-O-trifluoromethyl, 2′-O-ethyl-trifluoromethoxy, or 2′-O-difluoromethoxy-ethoxy purine nucleotides or alternately a plurality of purine nucleotides are 2′-O-methyl, 4′-thio, 2′-O-trifluoromethyl, 2′-O-ethyl-trifluoromethoxy, or 2′-O-difluoromethoxy-ethoxy purine nucleotides).

[0120] In one embodiment, the invention features a chemically-modified short interfering nucleic acid (siNA) molecule, of the invention comprising a sense region, wherein any (e.g., one or more or all) pyrimidine nucleotides present in the sense region are 2′-deoxy-2′-fluoro, 4′-thio, 2′-O-trifluoromethyl, 2′-O-ethyl-trifluoromethoxy, or 2′-O-difluoromethoxy-ethoxy pyrimidine nucleotides (e.g., wherein all pyrimidine nucleotides are 2′-deoxy-2′-fluoro, 4′-thio, 2′-O-trifluoromethyl, 2′-O-ethyl-trifluoromethoxy, or 2′-O-difluoromethoxy-ethoxy pyrimidine nucleotides or alternately a plurality of pyrimidine nucleotides are 2′-deoxy-2′-fluoro, 4′-thio, 2′-O-trifluoromethyl, 2′-O-ethyl-trifluoromethoxy, or 2′-O-difluoromethoxy-ethoxy pyrimidine nucleotides), wherein any (e.g., one or more or all) purine nucleotides present in the sense region are 2′-O-methyl, 4′-thio, 2′-O-trifluoromethyl, 2′-O-ethyl-trifluoromethoxy, or 2′-O-difluoromethoxy-ethoxy purine nucleotides (e.g., wherein all purine nucleotides are 2′-O-methyl, 4′-thio, 2′-O-trifluoromethyl, 2′-O-ethyl-trifluoromethoxy, or 2′-O-difluoromethoxy-ethoxy purine nucleotides or alternately a plurality of purine nucleotides are 2′-O-methyl, 4′-thio, 2′-O-trifluoromethyl, 2′-O-ethyl-trifluoromethoxy, or 2′-O-difluoromethoxy-ethoxy purine nucleotides), and wherein any nucleotides comprising a 3′-terminal nucleotide overhang that are present in said sense region are 2′-deoxy nucleotides.

[0121] In one embodiment, the invention features a chemically-modified short interfering nucleic acid (siNA) molecule of the invention comprising an antisense region, wherein any (e.g., one or more or all) pyrimidine nucleotides present in the antisense region are 2′-deoxy-2′-fluoro, 4′-thio, 2′-O-trifluoromethyl, 2′-O-ethyl-trifluoromethoxy, or 2′-O-difluoromethoxy-ethoxy pyrimidine nucleotides (e.g., wherein all pyrimidine nucleotides are 2′-deoxy-2′-fluoro, 4′-thio, 2′-O-trifluoromethyl, 2′-O-ethyl-trifluoromethoxy, or 2′-O-difluoromethoxy-ethoxy pyrimidine nucleotides or alternately a plurality of pyrimidine nucleotides are 2′-deoxy-2′-fluoro, 4′-thio, 2′-O-trifluoromethyl, 2′-O-ethyl-trifluoromethoxy, or 2′-O-difluoromethoxy-ethoxy pyrimidine nucleotides), and wherein any (e.g., one or more or all) purine nucleotides present in the antisense region are 2′-O-methyl, 4′-thio, 2′-O-trifluoromethyl, 2′-O-ethyl-trifluoromethoxy, or 2′-O-difluoromethoxy-ethoxy purine nucleotides (e.g., wherein all purine nucleotides are 2′-O-methyl, 4′-thio, 2′-O-trifluoromethyl, 2′-O-ethyl-trifluoromethoxy, or 2′-O-difluoromethoxy-ethoxy purine nucleotides or alternately a plurality of purine nucleotides are 2′-O-methyl, 4′-thio, 2′-O-trifluoromethyl, 2′-O-ethyl-trifluoromethoxy, or 2′-O-difluoromethoxy-ethoxy purine nucleotides).

[0122] In one embodiment, the invention features a chemically-modified short interfering nucleic acid (siNA) molecule of the invention comprising an antisense region, wherein any (e.g., one or more or all) pyrimidine nucleotides present in the antisense region are 2′-deoxy-2′-fluoro, 4′-thio, 2′-O-trifluoromethyl, 2′-O-ethyl-trifluoromethoxy, or 2′-O-difluoromethoxy-ethoxy pyrimidine nucleotides (e.g., wherein all pyrimidine nucleotides are 2′-deoxy-2′-fluoro, 4′-thio, 2′-O-trifluoromethyl, 2′-O-ethyl-trifluoromethoxy, or 2′-O-difluoromethoxy-ethoxy pyrimidine nucleotides or alternately a plurality of pyrimidine nucleotides are 2′-deoxy-2′-fluoro, 4′-thio, 2′-O-trifluoromethyl, 2′-O-ethyl-trifluoromethoxy, or 2′-O-difluoromethoxy-ethoxy pyrimidine nucleotides), wherein any (e.g., one or more or all) purine nucleotides present in the antisense region are 2′-O-methyl, 4′-thio, 2′-O-trifluoromethyl, 2′-O-ethyl-trifluoromethoxy, or 2′-O-difluoromethoxy-ethoxy purine nucleotides (e.g., wherein all purine nucleotides are 2′-O-methyl, 4′-thio, 2′-O-trifluoromethyl, 2′-O-ethyl-trifluoromethoxy, or 2′-O-difluoromethoxy-ethoxy purine nucleotides or alternately a plurality of purine nucleotides are 2′-O-methyl, 4′-thio, 2′-O-trifluoromethyl, 2′-O-ethyl-trifluoromethoxy, or 2′-O-difluoromethoxy-ethoxy purine nucleotides), and wherein any nucleotides comprising a 3′-terminal nucleotide overhang that are present in said antisense region are 2′-deoxy nucleotides.

[0123] In one embodiment, the invention features a chemically-modified short interfering nucleic acid (siNA) molecule of the invention comprising an antisense region, wherein any (e.g., one or more or all) pyrimidine nucleotides present in the antisense region are 2′-deoxy-2′-fluoro, 4′-thio, 2′-O-trifluoromethyl, 2′-O-ethyl-trifluoromethoxy, or 2′-O-difluoromethoxy-ethoxy pyrimidine nucleotides (e.g., wherein all pyrimidine nucleotides are 2′-deoxy-2′-fluoro, 4′-thio, 2′-O-trifluoromethyl, 2′-O-ethyl-trifluoromethoxy, or 2′-O-difluoromethoxy-ethoxy pyrimidine nucleotides or alternately a plurality of pyrimidine nucleotides are 2′-deoxy-2′-fluoro, 4′-thio, 2′-O-trifluoromethyl, 2′-O-ethyl-trifluoromethoxy, or 2′-O-difluoromethoxy-ethoxy pyrimidine nucleotides), and wherein any (e.g., one or more or all) purine nucleotides present in the antisense region are 2′-deoxy purine nucleotides (e.g., wherein all purine nucleotides are 2′-deoxy purine nucleotides or alternately a plurality of purine nucleotides are 2′-deoxy purine nucleotides).

[0124] In one embodiment, the invention features a chemically-modified short interfering nucleic acid (siNA) molecule of the invention comprising an antisense region, wherein any (e.g., one or more or all) pyrimidine nucleotides present in the antisense region are 2′-deoxy-2′-fluoro, 4′-thio, 2′-O-trifluoromethyl, 2′-O-ethyl-trifluoromethoxy, or 2′-O-difluoromethoxy-ethoxy pyrimidine nucleotides (e.g., wherein all pyrimidine nucleotides are 2′-deoxy-2′-fluoro, 4′-thio, 2′-O-trifluoromethyl, 2′-O-ethyl-trifluoromethoxy, or 2′-O-difluoromethoxy-ethoxy pyrimidine nucleotides or alternately a plurality of pyrimidine nucleotides are 2′-deoxy-2′-fluoro, 4′-thio, 2′-O-trifluoromethyl, 2′-O-ethyl-trifluoromethoxy, or 2′-O-difluoromethoxy-ethoxy pyrimidine nucleotides), and wherein any (e.g., one or more or all) purine nucleotides present in the antisense region are 2′-O-methyl, 4′-thio, 2′-O-trifluoromethyl, 2′-O-ethyl-trifluoromethoxy, or 2′-O-difluoromethoxy-ethoxy purine nucleotides (e.g., wherein all purine nucleotides are 2′-O-methyl, 4′-thio, 2′-O-trifluoromethyl, 2′-O-ethyl-trifluoromethoxy, or 2′-O-difluoromethoxy-ethoxy purine nucleotides or alternately a plurality of purine nucleotides are 2′-O-methyl, 4′-thio, 2′-O-trifluoromethyl, 2′-O-ethyl-trifluoromethoxy, or 2′-O-difluoromethoxy-ethoxy purine nucleotides).

[0125] In one embodiment, the invention features a chemically-modified short interfering nucleic acid (siNA) molecule of the invention capable of mediating RNA interference (RNAi) against interleukin and/or interleukin receptor inside a cell or reconstituted in vitro system comprising a sense region, wherein one or more pyrimidine nucleotides present in the sense region are 2′-deoxy-2′-fluoro, 4′-thio, 2′-O-trifluoromethyl, 2′-O-ethyl-trifluoromethoxy, or 2′-O-difluoromethoxy-ethoxy pyrimidine nucleotides (e.g., wherein all pyrimidine nucleotides are 2′-deoxy-2′-fluoro, 4′-thio, 2′-O-trifluoromethyl, 2′-O-ethyl-trifluoromethoxy, or 2′-O-difluoromethoxy-ethoxy pyrimidine nucleotides or alternately a plurality of pyrimidine nucleotides are 2′-deoxy-2′-fluoro, 4′-thio, 2′-O-trifluoromethyl, 2′-O-ethyl-trifluoromethoxy, or 2′-O-difluoromethoxy-ethoxy pyrimidine nucleotides), and one or more purine nucleotides present in the sense region are 2′-deoxy purine nucleotides (e.g., wherein all purine nucleotides are 2′-deoxy purine nucleotides or alternately a plurality of purine nucleotides are 2′-deoxy purine nucleotides), and an antisense region, wherein one or more pyrimidine nucleotides present in the antisense region are 2′-deoxy-2′-fluoro, 4′-thio, 2′-O-trifluoromethyl, 2′-O-ethyl-trifluoromethoxy, or 2′-O-difluoromethoxy-ethoxy pyrimidine nucleotides (e.g., wherein all pyrimidine nucleotides are 2′-deoxy-2′-fluoro, 4′-thio, 2′-O-trifluoromethyl, 2′-O-ethyl-trifluoromethoxy, or 2′-O-difluoromethoxy-ethoxy pyrimidine nucleotides or alternately a plurality of pyrimidine nucleotides are 2′-deoxy-2′-fluoro, 4′-thio, 2′-O-trifluoromethyl, 2′-O-ethyl-trifluoromethoxy, or 2′-O-difluoromethoxy-ethoxy pyrimidine nucleotides), and one or more purine nucleotides present in the antisense region are 2′-O-methyl, 4′-thio, 2′-O-trifluoromethyl, 2′-O-ethyl-trifluoromethoxy, or 2′-O-difluoromethoxy-ethoxy purine nucleotides (e.g., wherein all purine nucleotides are 2′-O-methyl, 4′-thio, 2′-O-trifluoromethyl, 2′-O-ethyl-trifluoromethoxy, or 2′-O-difluoromethoxy-ethoxy purine nucleotides or alternately a plurality of purine nucleotides are 2′-O-methyl, 4′-thio, 2′-O-trifluoromethyl, 2′-O-ethyl-trifluoromethoxy, or 2′-O-difluoromethoxy-ethoxy purine nucleotides). The sense region and/or the antisense region can have a terminal cap modification, such as any modification described herein or shown in FIG. 10, that is optionally present at the 3′-end, the 5′-end, or both of the 3′ and 5′-ends of the sense and/or antisense sequence. The sense and/or antisense region can optionally further comprise a 3′-terminal nucleotide overhang having about 1 to about 4 (e.g., about 1, 2, 3, or 4) 2′-deoxynucleotides. The overhang nucleotides can further comprise one or more (e.g., about 1, 2, 3, 4 or more) phosphorothioate, phosphonoacetate, and/or thiophosphonoacetate internucleotide linkages. Non-limiting examples of these chemically-modified siNAs are shown in FIGS. 4 and 5 and Tables III and IV herein. In any of these described embodiments, the purine nucleotides present in the sense region are alternatively 2′-O-methyl, 4′-thio, 2′-O-trifluoromethyl, 2′-O-ethyl-trifluoromethoxy, or 2′-O-difluoromethoxy-ethoxy purine nucleotides (e.g., wherein all purine nucleotides are 2′-O-methyl, 4′-thio, 2′-O-trifluoromethyl, 2′-O-ethyl-trifluoromethoxy, or 2′-O-difluoromethoxy-ethoxy purine nucleotides or alternately a plurality of purine nucleotides are 2′-O-methyl, 4′-thio, 2′-O-trifluoromethyl, 2′-O-ethyl-trifluoromethoxy, or 2′-O-difluoromethoxy-ethoxy purine nucleotides) and one or more purine nucleotides present in the antisense region are 2′-O-methyl, 4′-thio, 2′-O-trifluoromethyl, 2′-O-ethyl-trifluoromethoxy, or 2′-O-difluoromethoxy-ethoxy purine nucleotides (e.g., wherein all purine nucleotides are 2′-O-methyl, 4′-thio, 2′-O-trifluoromethyl, 2′-O-ethyl-trifluoromethoxy, or 2′-O-difluoromethoxy-ethoxy purine nucleotides or alternately a plurality of purine nucleotides are 2′-O-methyl, 4′-thio, 2′-O-trifluoromethyl, 2′-O-ethyl-trifluoromethoxy, or 2′-O-difluoromethoxy-ethoxy purine nucleotides). Also, in any of these embodiments, one or more purine nucleotides present in the sense region are alternatively purine ribonucleotides (e.g., wherein all purine nucleotides are purine ribonucleotides or alternately a plurality of purine nucleotides are purine ribonucleotides) and any purine nucleotides present in the antisense region are 2′-O-methyl, 4′-thio, 2′-O-trifluoromethyl, 2′-O-ethyl-trifluoromethoxy, or 2′-O-difluoromethoxy-ethoxy purine nucleotides (e.g., wherein all purine nucleotides are 2′-O-methyl, 4′-thio, 2′-O-trifluoromethyl, 2′-O-ethyl-trifluoromethoxy, or 2′-O-difluoromethoxy-ethoxy purine nucleotides or alternately a plurality of purine nucleotides are 2′-O-methyl, 4′-thio, 2′-O-trifluoromethyl, 2′-O-ethyl-trifluoromethoxy, or 2′-O-difluoromethoxy-ethoxy purine nucleotides). Additionally, in any of these embodiments, one or more purine nucleotides present in the sense region and/or present in the antisense region are alternatively selected from the group consisting of 2′-deoxy nucleotides, locked nucleic acid (LNA) nucleotides, 2′-methoxyethyl nucleotides, 4′-thionucleotides, 2′-O-trifluoromethyl nucleotides, 2′-O-ethyl-trifluoromethoxy nucleotides, 2′-O-difluoromethoxy-ethoxy nucleotides and 2′-O-methyl nucleotides (e.g., wherein all purine nucleotides are selected from the group consisting of 2′-deoxy nucleotides, locked nucleic acid (LNA) nucleotides, 2′-methoxyethyl nucleotides, 4′-thionucleotides, 2′-O-trifluoromethyl nucleotides, 2′-O-ethyl-trifluoromethoxy nucleotides, 2′-O-difluoromethoxy-ethoxy nucleotides and 2′-O-methyl nucleotides or alternately a plurality of purine nucleotides are selected from the group consisting of 2′-deoxy nucleotides, locked nucleic acid (LNA) nucleotides, 2′-methoxyethyl nucleotides, 4′-thionucleotides, 2′-O-trifluoromethyl nucleotides, 2′-O-ethyl-trifluoromethoxy nucleotides, 2′-O-difluoromethoxy-ethoxy nucleotides and 2′-O-methyl nucleotides).

[0126] In another embodiment, any modified nucleotides present in the siNA molecules of the invention, preferably in the antisense strand of the siNA molecules of the invention, but also optionally in the sense and/or both antisense and sense strands, comprise modified nucleotides having properties or characteristics similar to naturally occurring ribonucleotides. For example, the invention features siNA molecules including modified nucleotides having a Northern conformation (e.g., Northern pseudorotation cycle, see for example Saenger, Principles of Nucleic Acid Structure, Springer-Verlag ed., 1984) otherwise known as a “ribo-like” or “A-form helix” configuration. As such, chemically modified nucleotides present in the siNA molecules of the invention, preferably in the antisense strand of the siNA molecules of the invention, but also optionally in the sense and/or both antisense and sense strands, are resistant to nuclease degradation while at the same time maintaining the capacity to mediate RNAi. Non-limiting examples of nucleotides having a northern configuration include locked nucleic acid (LNA) nucleotides (e.g., 2′-O, 4′-C-methylene-(D-ribofuranosyl) nucleotides); 2′-methoxyethoxy (MOE) nucleotides; 2′-methyl-thio-ethyl, 2′-deoxy-2′-fluoro nucleotides, 2′-deoxy-2′-chloro nucleotides, 2′-azido nucleotides, 2′-O-trifluoromethyl nucleotides, 2′-O-ethyl-trifluoromethoxy nucleotides, 2′-O-difluoromethoxy-ethoxy nucleotides, 4′-thio nucleotides and 2′-O-methyl nucleotides.

[0127] In one embodiment, the sense strand of a double stranded siNA molecule of the invention comprises a terminal cap moiety, (see for example FIG. 10) such as an inverted deoxyabasic moiety, at the 3′-end, 5′-end, or both 3′ and 5′-ends of the sense strand.

[0128] In one embodiment, the invention features a chemically-modified short interfering nucleic acid molecule (siNA) capable of mediating RNA interference (RNAi) against interleukin and/or interleukin receptor inside a cell or reconstituted in vitro system, wherein the chemical modification comprises a conjugate covalently attached to the chemically-modified siNA molecule. Non-limiting examples of conjugates contemplated by the invention include conjugates and ligands described in Vargeese et al., U.S. Ser. No. 10/427,160, filed Apr. 30, 2003, incorporated by reference herein in its entirety, including the drawings. In another embodiment, the conjugate is covalently attached to the chemically-modified siNA molecule via a biodegradable linker. In one embodiment, the conjugate molecule is attached at the 3′-end of either the sense strand, the antisense strand, or both strands of the chemically-modified siNA molecule. In another embodiment, the conjugate molecule is attached at the 5′-end of either the sense strand, the antisense strand, or both strands of the chemically-modified siNA molecule. In yet another embodiment, the conjugate molecule is attached both the 3′-end and 5′-end of either the sense strand, the antisense strand, or both strands of the chemically-modified siNA molecule, or any combination thereof. In one embodiment, a conjugate molecule of the invention comprises a molecule that facilitates delivery of a chemically-modified siNA molecule into a biological system, such as a cell. In another embodiment, the conjugate molecule attached to the chemically-modified siNA molecule is a cholesterol, polyethylene glycol, human serum albumin, or a ligand for a cellular receptor, such as peptides derived from naturally occurring protein ligands; protein localization sequences, including cellular ZIP code sequences; antibodies; nucleic acid aptamers; vitamins and other co-factors, such as folate and N-acetylgalactosamine; polymers, such as polyethyleneglycol (PEG); phospholipids; cholesterol; steroids, and polyamines, such as PEI, spermine or spermidine. Examples of specific conjugate molecules contemplated by the instant invention that can be attached to chemically-modified siNA molecules are described in Vargeese et al., U.S. Ser. No. 10/201,394, filed Jul. 22, 2002 incorporated by reference herein. The type of conjugates used and the extent of conjugation of siNA molecules of the invention can be evaluated for improved pharmacokinetic profiles, bioavailability, and/or stability of siNA constructs while at the same time maintaining the ability of the siNA to mediate RNAi activity. As such, one skilled in the art can screen siNA constructs that are modified with various conjugates to determine whether the siNA conjugate complex possesses improved properties while maintaining the ability to mediate RNAi, for example in animal models as are generally known in the art.

[0129] In one embodiment, the invention features a short interfering nucleic acid (siNA) molecule of the invention, wherein the siNA further comprises a nucleotide, non-nucleotide, or mixed nucleotide/non-nucleotide linker that joins the sense region of the siNA to the antisense region of the siNA. In one embodiment, a nucleotide, non-nucleotide, or mixed nucleotide/non-nucleotide linker is used, for example, to attach a conjugate moiety to the siNA. In one embodiment, a nucleotide linker of the invention can be a linker of >2 nucleotides in length, for example about 3, 4, 5, 6, 7, 8, 9, or 10 nucleotides in length. In another embodiment, the nucleotide linker can be a nucleic acid aptamer. By “aptamer” or “nucleic acid aptamer” as used herein is meant a nucleic acid molecule that binds specifically to a target molecule wherein the nucleic acid molecule has sequence that comprises a sequence recognized by the target molecule in its natural setting. Alternately, an aptamer can be a nucleic acid molecule that binds to a target molecule where the target molecule does not naturally bind to a nucleic acid. The target molecule can be any molecule of interest. For example, the aptamer can be used to bind to a ligand-binding domain of a protein, thereby preventing interaction of the naturally occurring ligand with the protein. This is a non-limiting example and those in the art will recognize that other embodiments can be readily generated using techniques generally known in the art. (See, for example, Gold et al., 1995, Annu. Rev. Biochem., 64, 763; Brody and Gold, 2000, J. Biotechnol., 74, 5; Sun, 2000, Curr. Opin. Mol. Ther., 2, 100; Kusser, 2000, J. Biotechnol., 74, 27; Hermann and Patel, 2000, Science, 287, 820; and Jayasena, 1999, Clinical Chemistry, 45, 1628.)

[0130] In yet another embodiment, a non-nucleotide linker of the invention comprises abasic nucleotide, polyether, polyamine, polyamide, peptide, carbohydrate, lipid, polyhydrocarbon, or other polymeric compounds (e.g. polyethylene glycols such as those having between 2 and 100 ethylene glycol units). Specific examples include those described by Seela and Kaiser, Nucleic Acids Res. 1990, 18:6353 and Nucleic Acids Res. 1987, 15:3113; Cload and Schepartz, J. Am. Chem. Soc. 1991, 113:6324; Richardson and Schepartz, J. Am. Chem. Soc. 1991, 113:5109; Ma et al., Nucleic Acids Res. 1993, 21:2585 and Biochemistry 1993, 32:1751; Durand et al., Nucleic Acids Res. 1990, 18:6353; McCurdy et al., Nucleosides & Nucleotides 1991, 10:287; Jschke et al., Tetrahedron Lett. 1993, 34:301; Ono et al., Biochemistry 1991, 30:9914; Arnold et al., International Publication No. WO 89/02439; Usman et al., International Publication No. WO 95/06731; Dudycz et al., International Publication No. WO 95/11910 and Ferentz and Verdine, J. Am. Chem. Soc. 1991, 113:4000, all hereby incorporated by reference herein. A “non-nucleotide” further means any group or compound that can be incorporated into a nucleic acid chain in the place of one or more nucleotide units, including either sugar and/or phosphate substitutions, and allows the remaining bases to exhibit their enzymatic activity. The group or compound can be abasic in that it does not contain a commonly recognized nucleotide base, such as adenosine, guanine, cytosine, uracil or thymine, for example at the C1 position of the sugar.

[0131] In one embodiment, the invention features a short interfering nucleic acid (siNA) molecule capable of mediating RNA interference (RNAi) inside a cell or reconstituted in vitro system, wherein one or both strands of the siNA molecule that are assembled from two separate oligonucleotides do not comprise any ribonucleotides. For example, a siNA molecule can be assembled from a single oligonucleotide where the sense and antisense regions of the siNA comprise separate oligonucleotides that do not have any ribonucleotides (e.g., nucleotides having a 2′-OH group) present in the oligonucleotides. In another example, a siNA molecule can be assembled from a single oligonucleotide where the sense and antisense regions of the siNA are linked or circularized by a nucleotide or non-nucleotide linker as described herein, wherein the oligonucleotide does not have any ribonucleotides (e.g., nucleotides having a 2′-OH group) present in the oligonucleotide. Applicant has surprisingly found that the presence of ribonucleotides (e.g., nucleotides having a 2′-hydroxyl group) within the siNA molecule is not required or essential to support RNAi activity. As such, in one embodiment, all positions within the siNA can include chemically modified nucleotides and/or non-nucleotides such as nucleotides and or non-nucleotides having Formula I, II, III, IV, V, VI, or VII or any combination thereof to the extent that the ability of the siNA molecule to support RNAi activity in a cell is maintained.

[0132] In one embodiment, a siNA molecule of the invention is a single stranded siNA molecule that mediates RNAi activity in a cell or reconstituted in vitro system comprising a single stranded polynucleotide having complementarity to a target nucleic acid sequence. In another embodiment, the single stranded siNA molecule of the invention comprises a 5′-terminal phosphate group. In another embodiment, the single stranded siNA molecule of the invention comprises a 5′-terminal phosphate group and a 3′-terminal phosphate group (e.g., a 2′,3′-cyclic phosphate). In another embodiment, the single stranded siNA molecule of the invention comprises about 15 to about 30 (e.g., about 15, 16, 17, 18, 19, 20, 21, 22, 23, 24, 25, 26, 27, 28, 29, or 30) nucleotides. In yet another embodiment, the single stranded siNA molecule of the invention comprises one or more chemically modified nucleotides or non-nucleotides described herein. For example, all the positions within the siNA molecule can include chemically-modified nucleotides such as nucleotides having any of Formulae I-VII, or any combination thereof to the extent that the ability of the siNA molecule to support RNAi activity in a cell is maintained.

[0133] In one embodiment, a siNA molecule of the invention is a single stranded siNA molecule that mediates RNAi activity in a cell or reconstituted in vitro system comprising a single stranded polynucleotide having complementarity to a target nucleic acid sequence, wherein one or more pyrimidine nucleotides present in the siNA are 2′-deoxy-2′-fluoro, 4′-thio, 2′-O-trifluoromethyl, 2′-O-ethyl-trifluoromethoxy, or 2′-O-difluoromethoxy-ethoxy pyrimidine nucleotides (e.g., wherein all pyrimidine nucleotides are 2′-deoxy-2′-fluoro, 4′-thio, 2′-O-trifluoromethyl, 2′-O-ethyl-trifluoromethoxy, or 2′-O-difluoromethoxy-ethoxy pyrimidine nucleotides or alternately a plurality of pyrimidine nucleotides are 2′-deoxy-2′-fluoro, 4′-thio, 2′-O-trifluoromethyl, 2′-O-ethyl-trifluoromethoxy, or 2′-O-difluoromethoxy-ethoxy pyrimidine nucleotides), and wherein any purine nucleotides present in the antisense region are 2′-O-methyl, 4′-thio, 2′-O-trifluoromethyl, 2′-O-ethyl-trifluoromethoxy, or 2′-O-difluoromethoxy-ethoxy purine nucleotides (e.g., wherein all purine nucleotides are 2′-O-methyl, 4′-thio, 2′-O-trifluoromethyl, 2′-O-ethyl-trifluoromethoxy, or 2′-O-difluoromethoxy-ethoxy purine nucleotides or alternately a plurality of purine nucleotides are 2′-O-methyl, 4′-thio, 2′-O-trifluoromethyl, 2′-O-ethyl-trifluoromethoxy, or 2′-O-difluoromethoxy-ethoxy purine nucleotides), and a terminal cap modification, such as any modification described herein or shown in FIG. 10, that is optionally present at the 3′-end, the 5′-end, or both of the 3′ and 5′-ends of the antisense sequence. The siNA optionally further comprises about 1 to about 4 or more (e.g., about 1, 2, 3, 4 or more) terminal 2′-deoxynucleotides at the 3′-end of the siNA molecule, wherein the terminal nucleotides can further comprise one or more (e.g., 1, 2, 3, 4 or more) phosphorothioate, phosphonoacetate, and/or thiophosphonoacetate internucleotide linkages, and wherein the siNA optionally further comprises a terminal phosphate group, such as a 5′-terminal phosphate group. In any of these embodiments, any purine nucleotides present in the antisense region are alternatively 2′-deoxy purine nucleotides (e.g., wherein all purine nucleotides are 2′-deoxy purine nucleotides or alternately a plurality of purine nucleotides are 2′-deoxy purine nucleotides). Also, in any of these embodiments, any purine nucleotides present in the siNA (i.e., purine nucleotides present in the sense and/or antisense region) can alternatively be locked nucleic acid (LNA) nucleotides (e.g., wherein all purine nucleotides are LNA nucleotides or alternately a plurality of purine nucleotides are LNA nucleotides). Also, in any of these embodiments, any purine nucleotides present in the siNA are alternatively 2′-methoxyethyl purine nucleotides (e.g., wherein all purine nucleotides are 2′-methoxyethyl purine nucleotides or alternately a plurality of purine nucleotides are 2′-methoxyethyl purine nucleotides). In another embodiment, any modified nucleotides present in the single stranded siNA molecules of the invention comprise modified nucleotides having properties or characteristics similar to naturally occurring ribonucleotides. For example, the invention features siNA molecules including modified nucleotides having a Northern conformation (e.g., Northern pseudorotation cycle, see for example Saenger, Principles of Nucleic Acid Structure, Springer-Verlag ed., 1984). As such, chemically modified nucleotides present in the single stranded siNA molecules of the invention are preferably resistant to nuclease degradation while at the same time maintaining the capacity to mediate RNAi.

[0134] In one embodiment, a siNA molecule of the invention comprises chemically modified nucleotides or non-nucleotides (e.g., having any of Formulae I-VII, such as 2′-deoxy, 2′-deoxy-2′-fluoro, 4′-thio, 2′-O-trifluoromethyl, 2′-O-ethyl-trifluoromethoxy, 2′-O-difluoromethoxy-ethoxy or 2′-O-methyl nucleotides) at alternating positions within one or more strands or regions of the siNA molecule. For example, such chemical modifications can be introduced at every other position of a RNA based siNA molecule, starting at either the first or second nucleotide from the 3′-end or 5′-end of the siNA. In a non-limiting example, a double stranded siNA molecule of the invention in which each strand of the siNA is 21 nucleotides in length is featured wherein positions 1, 3, 5, 7, 9, 11, 13, 15, 17, 19 and 21 of each strand are chemically modified (e.g., with compounds having any of Formulae I-VII, such as such as 2′-deoxy, 2′-deoxy-2′-fluoro, 4′-thio, 2′-O-trifluoromethyl, 2′-O-ethyl-trifluoromethoxy, 2′-O-difluoromethoxy-ethoxy or 2′-O-methyl nucleotides). In another non-limiting example, a double stranded siNA molecule of the invention in which each strand of the siNA is 21 nucleotides in length is featured wherein positions 2, 4, 6, 8, 10, 12, 14, 16, 18, and 20 of each strand are chemically modified (e.g., with compounds having any of Formulae I-VII, such as such as 2′-deoxy, 2′-deoxy-2′-fluoro, 4′-thio, 2′-O-trifluoromethyl, 2′-O-ethyl-trifluoromethoxy, 2′-O-difluoromethoxy-ethoxy or 2′-O-methyl nucleotides). In one embodiment, one strand of the double stranded siNA molecule comprises chemical modifications at positions 2, 4, 6, 8, 10, 12, 14, 16, 18, and 20 and chemical modifications at positions 1, 3, 5, 7, 9, 11, 13, 15, 17, 19 and 21. Such siNA molecules can further comprise terminal cap moieties and/or backbone modifications as described herein.

[0135] In one embodiment, a siNA molecule of the invention comprises the following features: if purine nucleotides are present at the 5′-end (e.g., at any of terminal nucleotide positions 1, 2, 3, 4, 5, or 6 from the 5′-end) of the antisense strand or antisense region (otherwise referred to as the guide sequence or guide strand) of the siNA molecule then such purine nucleosides are ribonucleotides. In another embodiment, the purine ribonucleotides, when present, are base paired to nucleotides of the sense strand or sense region (otherwise referred to as the passenger strand) of the siNA molecule. Such purine ribonucleotides can be present in a siNA stabilization motif that otherwise comprises modified nucleotides.

[0136] In one embodiment, a siNA molecule of the invention comprises the following features: if pyrimidine nucleotides are present at the 5′-end (e.g., at any of terminal nucleotide positions 1, 2, 3, 4, 5, or 6 from the 5′-end) of the antisense strand or antisense region (otherwise referred to as the guide sequence or guide strand) of the siNA molecule then such pyrimidine nucleosides are ribonucleotides. In another embodiment, the pyrimidine ribonucleotides, when present, are base paired to nucleotides of the sense strand or sense region (otherwise referred to as the passenger strand) of the siNA molecule. Such pyrimidine ribonucleotides can be present in a siNA stabilization motif that otherwise comprises modified nucleotides.

[0137] In one embodiment, a siNA molecule of the invention comprises the following features: if pyrimidine nucleotides are present at the 5′-end (e.g., at any of terminal nucleotide positions 1, 2, 3, 4, 5, or 6 from the 5′-end) of the antisense strand or antisense region (otherwise referred to as the guide sequence or guide strand) of the siNA molecule then such pyrimidine nucleosides are modified nucleotides. In another embodiment, the modified pyrimidine nucleotides, when present, are base paired to nucleotides of the sense strand or sense region (otherwise referred to as the passenger strand) of the siNA molecule. Non-limiting examples of modified pyrimidine nucleotides include those having any of Formulae I-VII, such as such as 2′-deoxy, 2′-deoxy-2′-fluoro, 4′-thio, 2′-O-trifluoromethyl, 2′-O-ethyl-trifluoromethoxy, 2′-O-difluoromethoxy-ethoxy or 2′-O-methyl nucleotides.

[0138] In one embodiment, the invention features a double stranded nucleic acid molecule having structure SI:

[chemical structure]

[0139] wherein each N is independently a nucleotide; each B is a terminal cap moiety that can be present or absent; (N) represents non-base paired or overhanging nucleotides which can be unmodified or chemically modified; [N] represents nucleotide positions wherein any purine nucleotides when present are ribonucleotides; X1 and X2 are independently integers from about 0 to about 4; X3 is an integer from about 9 to about 21; X4 is an integer from about 11 to about 20, provided that the sum of X4 and X5 is between 17-21; X5 is an integer from about 1 to about 6; and

[0140] (a) any pyrimidine nucleotides present in the antisense strand (lower strand) are 2′-deoxy-2′-fluoro nucleotides; any purine nucleotides present in the antisense strand (lower strand) other than the purines nucleotides in the [N] nucleotide positions, are independently 2′-O-methyl nucleotides, 2′-deoxyribonucleotides or a combination of 2′-deoxyribonucleotides and 2′-O-methyl nucleotides;

[0141] (b) any pyrimidine nucleotides present in the sense strand (upper strand) are 2′-deoxy-2′-fluoro nucleotides; any purine nucleotides present in the sense strand (upper strand) are independently 2′-deoxyribonucleotides, 2′-O-methyl nucleotides or a combination of 2′-deoxyribonucleotides and 2′-O-methyl nucleotides; and

[0142] (c) any (N) nucleotides are optionally deoxyribonucleotides.

[0143] In one embodiment, the invention features a double stranded nucleic acid molecule having structure SII:

[chemical structure]

[0144] wherein each N is independently a nucleotide; each B is a terminal cap moiety that can be present or absent; (N) represents non-base paired or overhanging nucleotides which can be unmodified or chemically modified; [N] represents nucleotide positions wherein any purine nucleotides when present are ribonucleotides; X1 and X2 are independently integers from about 0 to about 4; X3 is an integer from about 9 to about 21; X4 is an integer from about 11 to about 20, provided that the sum of X4 and X5 is between 17-21; X5 is an integer from about 1 to about 6; and

[0145] (a) any pyrimidine nucleotides present in the antisense strand (lower strand) are 2′-deoxy-2′-fluoro nucleotides; any purine nucleotides present in the antisense strand (lower strand) other than the purines nucleotides in the [N] nucleotide positions, are 2′-O-methyl nucleotides;

[0146] (b) any pyrimidine nucleotides present in the sense strand (upper strand) are ribonucleotides; any purine nucleotides present in the sense strand (upper strand) are ribonucleotides; and

[0147] (c) any (N) nucleotides are optionally deoxyribonucleotides.

[0148] In one embodiment, the invention features a double stranded nucleic acid molecule having structure SIII:

[chemical structure]

[0149] wherein each N is independently a nucleotide; each B is a terminal cap moiety that can be present or absent; (N) represents non-base paired or overhanging nucleotides which can be unmodified or chemically modified; [N] represents nucleotide positions wherein any purine nucleotides when present are ribonucleotides; X1 and X2 are independently integers from about 0 to about 4; X3 is an integer from about 9 to about 21; X4 is an integer from about 11 to about 20, provided that the sum of X4 and X5 is between 17-21; X5 is an integer from about 1 to about 6; and

[0150] (a) any pyrimidine nucleotides present in the antisense strand (lower strand) are 2′-deoxy-2′-fluoro nucleotides; any purine nucleotides present in the antisense strand

[0151] (lower strand) other than the purines nucleotides in the [N] nucleotide positions, are 2′-O-methyl nucleotides;

[0152] (b) any pyrimidine nucleotides present in the sense strand (upper strand) are 2′-deoxy-2′-fluoro nucleotides; any purine nucleotides present in the sense strand (upper strand) are ribonucleotides; and

[0153] (c) any (N) nucleotides are optionally deoxyribonucleotides.

[0154] In one embodiment, the invention features a double stranded nucleic acid molecule having structure SIV:

[chemical structure]

[0155] wherein each N is independently a nucleotide; each B is a terminal cap moiety that can be present or absent; (N) represents non-base paired or overhanging nucleotides which can be unmodified or chemically modified; [N] represents nucleotide positions wherein any purine nucleotides when present are ribonucleotides; X1 and X2 are independently integers from about 0 to about 4; X3 is an integer from about 9 to about 21; X4 is an integer from about 11 to about 20, provided that the sum of X4 and X5 is between 17-21; X5 is an integer from about 1 to about 6; and

[0156] (a) any pyrimidine nucleotides present in the antisense strand (lower strand) are 2′-deoxy-2′-fluoro nucleotides; any purine nucleotides present in the antisense strand (lower strand) other than the purines nucleotides in the [N] nucleotide positions, are 2′-O-methyl nucleotides;

[0157] (b) any pyrimidine nucleotides present in the sense strand (upper strand) are 2′-deoxy-2′-fluoro nucleotides; any purine nucleotides present in the sense strand (upper strand) are deoxyribonucleotides; and

[0158] (c) any (N) nucleotides are optionally deoxyribonucleotides.

[0159] In one embodiment, the invention features a double stranded nucleic acid molecule having structure SV:

[chemical structure]

[0160] wherein each N is independently a nucleotide; each B is a terminal cap moiety that can be present or absent; (N) represents non-base paired or overhanging nucleotides which can be unmodified or chemically modified; [N] represents nucleotide positions wherein any purine nucleotides when present are ribonucleotides; X1 and X2 are independently integers from about 0 to about 4; X3 is an integer from about 9 to about 21; X4 is an integer from about 11 to about 20, provided that the sum of X4 and X5 is between 17-21; X5 is an integer from about 1 to about 6; and

[0161] (a) any pyrimidine nucleotides present in the antisense strand (lower strand) are nucleotides having a ribo-like configuration (e.g., Northern or A-form helix configuration); any purine nucleotides present in the antisense strand (lower strand) other than the purines nucleotides in the [N] nucleotide positions, are 2′-O-methyl nucleotides;

[0162] (b) any pyrimidine nucleotides present in the sense strand (upper strand) are nucleotides having a ribo-like configuration (e.g., Northern or A-form helix configuration); any purine nucleotides present in the sense strand (upper strand) are 2′-O-methyl nucleotides; and

[0163] (c) any (N) nucleotides are optionally deoxyribonucleotides.

[0164] In one embodiment, a double stranded nucleic acid molecule having any of structure SI, SII, SIII, SIV, SV, or SVI comprises an antisense strand having complementarity to a Interleukin and/or interleukin receptor target polynucleotide (e.g., Interleukin and/or interleukin receptor RNA or DNA). In another embodiment, the Interleukin and/or interleukin receptor target polynucleotide is DSG1, DSG2, DSG3, and/or DSG4 RNA and/or DNA. In another embodiment, the Interleukin and/or interleukin receptor target polynucleotide is conserved across all Interleukin and/or interleukin receptor isoforms.

[0165] In one embodiment, a double stranded nucleic acid molecule having any of structure SI, SII, SIII, SIV, SV, or SVI comprises a terminal phosphate group at the 5′-end of the antisense strand or antisense region of the nucleic acid molecule.

[0166] In one embodiment, a double stranded nucleic acid molecule having any of structure SI, SII, SIII, SIV, SV, or SVI comprises X5=1, 2, or 3; each X1 and X2=1 or 2; X3=12, 13, 14, 15, 16, 17, 18, 19, 20, 21, 22, 23, 24, 25, 26, 27, 28, 29, or 30, and X4=15, 16, 17, 18, 19, 20, 21, 22, 23, 24, 25, 26, 27, 28, 29, or 30.

[0167] In one embodiment, a double stranded nucleic acid molecule having any of structure SI, SII, SIII, SIV, SV, or SVI comprises X5=1; each X1 and X2=2; X3=19, and X4=18.

[0168] In one embodiment, a double stranded nucleic acid molecule having any of structure SI, SII, SIII, SIV, SV, or SVI comprises X5=2; each X1 and X2=2; X3=19, and X4=17

[0169] In one embodiment, a double stranded nucleic acid molecule having any of structure SI, SII, SIII, SIV, SV, or SVI comprises X5=3; each X1 and X2=2; X3=19, and X4=16.

[0170] In one embodiment, a double stranded nucleic acid molecule having any of structure SI, SII, SIII, SIV, SV, or SVI comprises B at the 3′ and 5′ ends of the sense strand or sense region.

[0171] In one embodiment, a double stranded nucleic acid molecule having any of structure SI, SII, SIII, SIV, SV, or SVI comprises B at the 3′-end of the antisense strand or antisense region.

[0172] In one embodiment, a double stranded nucleic acid molecule having any of structure SI, SI, SIII, SIV, SV, or SVI comprises B at the 3′ and 5′ ends of the sense strand or sense region and B at the 3′-end of the antisense strand or antisense region.

[0173] In one embodiment, a double stranded nucleic acid molecule having any of structure SI, SII, SIII, SIV, SV, or SVI further comprises one or more phosphorothioate internucleotide linkages at the first terminal (N) on the 3′ end of the sense strand, antisense strand, or both sense strand and antisense strands of the nucleic acid molecule. For example, a double stranded nucleic acid molecule can comprise X1 and/or X2=2 having overhanging nucleotide positions with a phosphorothioate internucleotide linkage, e.g., (NsN) where “s” indicates phosphorothioate.

[0174] In one embodiment, the invention features a method for modulating the expression of an interleukin and/or interleukin receptor gene within a cell comprising: (a) synthesizing a siNA molecule of the invention, which can be chemically-modified or unmodified, wherein one of the siNA strands comprises a sequence complementary to RNA of the interleukin and/or interleukin receptor gene; and (b) introducing the siNA molecule into a cell under conditions suitable to modulate (e.g., inhibit) the expression of the interleukin and/or interleukin receptor gene in the cell.

[0175] In one embodiment, the invention features a method for modulating the expression of an interleukin and/or interleukin receptor gene within a cell comprising: (a) synthesizing a siNA molecule of the invention, which can be chemically-modified or unmodified, wherein one of the siNA strands comprises a sequence complementary to RNA of the interleukin and/or interleukin receptor gene and wherein the sense strand sequence of the siNA comprises a sequence identical or substantially similar to the sequence of the target RNA; and (b) introducing the siNA molecule into a cell under conditions suitable to modulate (e.g., inhibit) the expression of the interleukin and/or interleukin receptor gene in the cell.

[0176] In another embodiment, the invention features a method for modulating the expression of more than one interleukin and/or interleukin receptor gene within a cell comprising: (a) synthesizing siNA molecules of the invention, which can be chemically-modified or unmodified, wherein one of the siNA strands comprises a sequence complementary to RNA of the interleukin and/or interleukin receptor genes; and (b) introducing the siNA molecules into a cell under conditions suitable to modulate (e.g., inhibit) the expression of the interleukin and/or interleukin receptor genes in the cell.

[0177] In another embodiment, the invention features a method for modulating the expression of two or more interleukin and/or interleukin receptor genes within a cell comprising: (a) synthesizing one or more siNA molecules of the invention, which can be chemically-modified or unmodified, wherein the siNA strands comprise sequences complementary to RNA of the interleukin and/or interleukin receptor genes and wherein the sense strand sequences of the siNAs comprise sequences identical or substantially similar to the sequences of the target RNAs; and (b) introducing the siNA molecules into a cell under conditions suitable to modulate (e.g., inhibit) the expression of the interleukin and/or interleukin receptor genes in the cell.

[0178] In another embodiment, the invention features a method for modulating the expression of more than one interleukin and/or interleukin receptor gene within a cell comprising: (a) synthesizing a siNA molecule of the invention, which can be chemically-modified or unmodified, wherein one of the siNA strands comprises a sequence complementary to RNA of the interleukin and/or interleukin receptor gene and wherein the sense strand sequence of the siNA comprises a sequence identical or substantially similar to the sequences of the target RNAs; and (b) introducing the siNA molecule into a cell under conditions suitable to modulate (e.g., inhibit) the expression of the interleukin and/or interleukin receptor genes in the cell.

[0179] In another embodiment, the invention features a method for modulating the expression of an interleukin gene and its corresponding receptor gene within a cell comprising: (a) synthesizing a siNA molecule of the invention, which can be chemically-modified or unmodified, wherein one of the siNA strands comprises a sequence complementary to RNA of the interleukin gene and the corresponding receptor gene, wherein the sense strand sequence of the siNA comprises a sequence identical or substantially similar to the sequences of the target RNAs; and (b) introducing the siNA molecule into a cell under conditions suitable to modulate (e.g., inhibit) the expression of the interleukin and/or interleukin receptor genes in the cell.

[0180] In one embodiment, siNA molecules of the invention are used as reagents in ex vivo applications. For example, siNA reagents are introduced into tissue or cells that are transplanted into a subject for therapeutic effect. The cells and/or tissue can be derived from an organism or subject that later receives the explant, or can be derived from another organism or subject prior to transplantation. The siNA molecules can be used to modulate the expression of one or more genes in the cells or tissue, such that the cells or tissue obtain a desired phenotype or are able to perform a function when transplanted in vivo. In one embodiment, certain target cells from a patient are extracted. These extracted cells are contacted with siNAs targeting a specific nucleotide sequence within the cells under conditions suitable for uptake of the siNAs by these cells (e.g. using delivery reagents such as cationic lipids, liposomes and the like or using techniques such as electroporation to facilitate the delivery of siNAs into cells). The cells are then reintroduced back into the same patient or other patients.

[0181] In one embodiment, the invention features a method of modulating the expression of an interleukin and/or interleukin receptor gene in a tissue explant comprising: (a) synthesizing a siNA molecule of the invention, which can be chemically-modified, wherein one of the siNA strands comprises a sequence complementary to RNA of the interleukin and/or interleukin receptor gene; and (b) introducing the siNA molecule into a cell of the tissue explant derived from a particular organism under conditions suitable to modulate (e.g., inhibit) the expression of the interleukin and/or interleukin receptor gene in the tissue explant. In another embodiment, the method further comprises introducing the tissue explant back into the organism the tissue was derived from or into another organism under conditions suitable to modulate (e.g., inhibit) the expression of the interleukin and/or interleukin receptor gene in that organism.

[0182] In one embodiment, the invention features a method of modulating the expression of an interleukin and/or interleukin receptor gene in a tissue explant comprising: (a) synthesizing a siNA molecule of the invention, which can be chemically-modified, wherein one of the siNA strands comprises a sequence complementary to RNA of the interleukin and/or interleukin receptor gene and wherein the sense strand sequence of the siNA comprises a sequence identical or substantially similar to the sequence of the target RNA; and (b) introducing the siNA molecule into a cell of the tissue explant derived from a particular organism under conditions suitable to modulate (e.g., inhibit) the expression of the interleukin and/or interleukin receptor gene in the tissue explant. In another embodiment, the method further comprises introducing the tissue explant back into the organism the tissue was derived from or into another organism under conditions suitable to modulate (e.g., inhibit) the expression of the interleukin and/or interleukin receptor gene in that organism.

[0183] In another embodiment, the invention features a method of modulating the expression of more than one interleukin and/or interleukin receptor gene in a tissue explant comprising: (a) synthesizing siNA molecules of the invention, which can be chemically-modified, wherein one of the siNA strands comprises a sequence complementary to RNA of the interleukin and/or interleukin receptor genes; and (b) introducing the siNA molecules into a cell of the tissue explant derived from a particular organism under conditions suitable to modulate (e.g., inhibit) the expression of the interleukin and/or interleukin receptor genes in the tissue explant. In another embodiment, the method further comprises introducing the tissue explant back into the organism the tissue was derived from or into another organism under conditions suitable to modulate (e.g., inhibit) the expression of the interleukin and/or interleukin receptor genes in that organism.

[0184] In one embodiment, the invention features a method of modulating the expression of an interleukin and/or interleukin receptor gene in a subject or organism comprising: (a) synthesizing a siNA molecule of the invention, which can be chemically-modified, wherein one of the siNA strands comprises a sequence complementary to RNA of the interleukin and/or interleukin receptor gene; and (b) introducing the siNA molecule into the subject or organism under conditions suitable to modulate (e.g., inhibit) the expression of the interleukin and/or interleukin receptor gene in the subject or organism. The level of interleukin and/or interleukin receptor protein or RNA can be determined using various methods well-known in the art.

[0185] In another embodiment, the invention features a method of modulating the expression of more than one interleukin and/or interleukin receptor gene in a subject or organism comprising: (a) synthesizing siNA molecules of the invention, which can be chemically-modified, wherein one of the siNA strands comprises a sequence complementary to RNA of the interleukin and/or interleukin receptor genes; and (b) introducing the siNA molecules into the subject or organism under conditions suitable to modulate (e.g., inhibit) the expression of the interleukin and/or interleukin receptor genes in the subject or organism. The level of interleukin and/or interleukin receptor protein or RNA can be determined as is known in the art.

[0186] In one embodiment, the invention features a method for modulating the expression of an interleukin and/or interleukin receptor gene within a cell comprising: (a) synthesizing a siNA molecule of the invention, which can be chemically-modified, wherein the siNA comprises a single stranded sequence having complementarity to RNA of the interleukin and/or interleukin receptor gene; and (b) introducing the siNA molecule into a cell under conditions suitable to modulate (e.g., inhibit) the expression of the interleukin and/or interleukin receptor gene in the cell.

[0187] In another embodiment, the invention features a method for modulating the expression of more than one interleukin and/or interleukin receptor gene within a cell comprising: (a) synthesizing siNA molecules of the invention, which can be chemically-modified, wherein the siNA comprises a single stranded sequence having complementarity to RNA of the interleukin and/or interleukin receptor gene; and (b) contacting the cell in vitro or in vivo with the siNA molecule under conditions suitable to modulate (e.g., inhibit) the expression of the interleukin and/or interleukin receptor genes in the cell.

[0188] In one embodiment, the invention features a method of modulating the expression of an interleukin and/or interleukin receptor gene in a tissue explant (e.g., a skin, heart, liver, spleen, cornea, lung, stomach, kidney, vein, artery, hair, appendage, or limb transplant, or any other organ, tissue or cell as can be transplanted from one organism to another or back to the same organism from which the organ, tissue or cell is derived) comprising: (a) synthesizing a siNA molecule of the invention, which can be chemically-modified, wherein the siNA comprises a single stranded sequence having complementarity to RNA of the interleukin and/or interleukin receptor gene; and (b) contacting a cell of the tissue explant derived from a particular subject or organism with the siNA molecule under conditions suitable to modulate (e.g., inhibit) the expression of the interleukin and/or interleukin receptor gene in the tissue explant. In another embodiment, the method further comprises introducing the tissue explant back into the subject or organism the tissue was derived from or into another subject or organism under conditions suitable to modulate (e.g., inhibit) the expression of the interleukin and/or interleukin receptor gene in that subject or organism.

[0189] In another embodiment, the invention features a method of modulating the expression of more than one interleukin and/or interleukin receptor gene in a tissue explant (e.g., a skin, heart, liver, spleen, cornea, lung, stomach, kidney, vein, artery, hair, appendage, or limb transplant, or any other organ, tissue or cell as can be transplanted from one organism to another or back to the same organism from which the organ, tissue or cell is derived) comprising: (a) synthesizing siNA molecules of the invention, which can be chemically-modified, wherein the siNA comprises a single stranded sequence having complementarity to RNA of the interleukin and/or interleukin receptor gene; and (b) introducing the siNA molecules into a cell of the tissue explant derived from a particular subject or organism under conditions suitable to modulate (e.g., inhibit) the expression of the interleukin and/or interleukin receptor genes in the tissue explant. In another embodiment, the method further comprises introducing the tissue explant back into the subject or organism the tissue was derived from or into another subject or organism under conditions suitable to modulate (e.g., inhibit) the expression of the interleukin and/or interleukin receptor genes in that subject or organism.

[0190] In one embodiment, the invention features a method of modulating the expression of an interleukin and/or interleukin receptor gene in a subject or organism comprising: (a) synthesizing a siNA molecule of the invention, which can be chemically-modified, wherein the siNA comprises a single stranded sequence having complementarity to RNA of the interleukin and/or interleukin receptor gene; and (b) introducing the siNA molecule into the subject or organism under conditions suitable to modulate (e.g., inhibit) the expression of the interleukin and/or interleukin receptor gene in the subject or organism.

[0191] In another embodiment, the invention features a method of modulating the expression of more than one interleukin and/or interleukin receptor gene in a subject or organism comprising: (a) synthesizing siNA molecules of the invention, which can be chemically-modified, wherein the siNA comprises a single stranded sequence having complementarity to RNA of the interleukin and/or interleukin receptor gene; and (b) introducing the siNA molecules into the subject or organism under conditions suitable to modulate (e.g., inhibit) the expression of the interleukin and/or interleukin receptor genes in the subject or organism.

[0192] In one embodiment, the invention features a method of modulating the expression of an interleukin and/or interleukin receptor gene in a subject or organism comprising contacting the subject or organism with a siNA molecule of the invention under conditions suitable to modulate (e.g., inhibit) the expression of the interleukin and/or interleukin receptor gene in the subject or organism.

[0193] In one embodiment, the invention features a method for treating or preventing an inflammatory, disease, disorder, or condition in a subject or organism comprising contacting the subject or organism with a siNA molecule of the invention under conditions suitable to modulate the expression of the interleukin and/or interleukin receptor gene in the subject or organism whereby the treatment or prevention of inflammatory, disease, disorder, and/or condition can be achieved. In one embodiment, the invention features contacting the subject or organism with a siNA molecule of the invention via local administration to relevant tissues or cells, such as tissues or cells affected by the inflammatory disease, disorder, or condition. Non-limiting examples of such tissues include lung, sinus, or nasopharyngeal tissues and cells, such as airway epithelial cells; gastrointestinal tissues and cells; CNS or PNS tissues and cells; cardiovascular tissues and cells; dermal or subcutaneous tissues and cells; liver tissues and cells; kidney tissues and cells, bladder tissues and cells; colorectal tissues and cells; synovial tissues and cells; musculoskeletal tissues and cells; ocular tissues and cells; lymphatic tissues and cells such as T-cells, B-cells, or macrophages; hematopoetic tissues and cells etc. In one embodiment, the invention features contacting the subject or organism with a siNA molecule of the invention via systemic administration (such as via intravenous or subcutaneous administration of siNA) to relevant tissues or cells, such as tissues or cells affected by the inflammatory disease, disorder, or condition. The siNA molecule of the invention can be formulated or conjugated as described herein or otherwise known in the art to target appropriate tissues or cells in the subject or organism.

[0194] In one embodiment, the invention features a method for treating or preventing a respiratory, disease, disorder, and/or condition in a subject or organism comprising contacting the subject or organism with a siNA molecule of the invention under conditions suitable to modulate the expression of the interleukin and/or interleukin receptor gene in the subject or organism whereby the treatment or prevention of respiratory, disease, disorder, and/or condition can be achieved. In one embodiment, the interleukin or interleukin receptor gene is IL-4, IL-4R, IL-5, IL-5R, IL-7, IL-7R, IL-9, IL-9R, IL-13, or IL-13R. In one embodiment, the respiratory disease is asthma, COPD, allergic rhinitis, or any other reparatory disease herein or otherwise known in the art (see for example Corry et al., 2002, Am. J. Resp. Med., 1, 185-193 and Blease et al., 2003, Exp. Opinion Emerging Drugs, 8, 71-81). In one embodiment, the invention features contacting the subject or organism with a siNA molecule of the invention via local administration to relevant tissues or cells, such as tissues or cells affected by the respiratory disease, disorder, or condition. Non-limiting examples of such tissues include lung, sinus, or nasopharyngeal tissues and cells, such as airway epithelial cells, mast cells, alveolar cells, bronchial epithelial cells, bronchial smooth muscle cells, and normal human lung fibroblasts. In one embodiment, the invention features contacting the subject or organism with a siNA molecule of the invention via systemic administration (such as via intravenous or subcutaneous administration of siNA) to relevant tissues or cells, such as tissues or cells affected by the respiratory disease, disorder, or condition. The siNA molecule of the invention can be formulated or conjugated as described herein or otherwise known in the art to target appropriate tissues or cells in the subject or organism.

[0195] In one embodiment, the invention features a method for inhibiting or reducing airway hyperresponsiveness in a subject or organism, comprising contacting the subject or organism with a siNA molecule of the invention under conditions suitable to modulate (e.g., inhibit) the expression of an appropriate interleukin and/or appropriate interleukin receptor gene in the subject or organism whereby the inhibition or reduction in the airway hyperresponsiveness can be achieved. In one embodiment, the interleukin or interleukin receptor gene is IL-4, IL-4R, IL-5, IL-5R, IL-7, IL-7R, IL-9, IL-9R, IL-13, or IL-13R. In one embodiment, the airway hyperresponsiveness is associated with asthma, COPD, allergic rhinitis, or any other reparatory disease herein or otherwise known in the art (see for example Corry et al., 2002, Am. J. Resp. Med., 1, 185-193 and Blease et al., 2003, Exp. Opinion Emerging Drugs, 8, 71-81). In one embodiment, the invention features contacting the subject or organism with a siNA molecule of the invention via local administration to relevant tissues or cells, such as tissues or cells affected by the respiratory disease, disorder, or condition. Non-limiting examples of such tissues include lung, sinus, or nasopharyngeal tissues and cells, such as airway epithelial cells, mast cells, alveolar cells, bronchial epithelial cells, bronchial smooth muscle cells, and normal human lung fibroblasts. In one embodiment, the invention features contacting the subject or organism with a siNA molecule of the invention via systemic administration (such as via intravenous or subcutaneous administration of siNA) to relevant tissues or cells, such as tissues or cells affected by the airway hyperresponsiveness. The siNA molecule of the invention can be formulated or conjugated as described herein or otherwise known in the art to target appropriate tissues or cells in the subject or organism.

[0196] In one embodiment, the invention features a method for treating or preventing a autoimmune disease, disorder, and/or condition in a subject or organism comprising contacting the subject or organism with a siNA molecule of the invention under conditions suitable to modulate the expression of the interleukin and/or interleukin receptor gene in the subject or organism whereby the treatment or prevention of autoimmune, disease, disorder, and/or condition can be achieved. In one embodiment, the invention features contacting the subject or organism with a siNA molecule of the invention via local administration to relevant tissues or cells, such as tissues or cells affected by the autoimmune disease, disorder, or condition. Non-limiting examples of such tissues include lung, sinus, or nasopharyngeal tissues and cells, such as airway epithelial cells; gastrointestinal tissues and cells; CNS or PNS tissues and cells; cardiovascular tissues and cells; dermal or subcutaneous tissues and cells; liver tissues and cells; kidney tissues and cells, bladder tissues and cells; colorectal tissues and cells; synovial tissues and cells; musculoskeletal tissues and cells; ocular tissues and cells; lymphatic tissues and cells such as T-cells, B-cells, or macrophages; hematopoetic tissues and cells etc. In one embodiment, the invention features contacting the subject or organism with a siNA molecule of the invention via systemic administration (such as via intravenous or subcutaneous administration of siNA) to relevant tissues or cells, such as tissues or cells affected by the autoimmune disease, disorder, or condition. The siNA molecule of the invention can be formulated or conjugated as described herein or otherwise known in the art to target appropriate tissues or cells in the subject or organism.

[0197] In one embodiment, the invention features a method for treating or preventing a cardiovascular disease, disorder, and/or condition in a subject or organism comprising contacting the subject or organism with a siNA molecule of the invention under conditions suitable to modulate the expression of the interleukin and/or interleukin receptor gene in the subject or organism whereby the treatment or prevention of cardiovascular, disease, disorder, and/or condition can be achieved. In one embodiment, the invention features contacting the subject or organism with a siNA molecule of the invention via local administration to relevant tissues or cells, such as tissues or cells affected by the cardiovascular disease, disorder, or condition. Non-limiting examples of such tissues and cells include vascular epithelial tissues and cells and/or cardiac tissues and cells etc. In one embodiment, the invention features contacting the subject or organism with a siNA molecule of the invention via systemic administration (such as via intravenous or subcutaneous administration of siNA) to relevant tissues or cells, such as tissues or cells affected by the cardiovascular disease, disorder, or condition. The siNA molecule of the invention can be formulated or conjugated as described herein or otherwise known in the art to target appropriate tissues or cells in the subject or organism.

[0198] In one embodiment, the invention features a method for treating or preventing a neurological disease, disorder, and/or condition in a subject or organism comprising contacting the subject or organism with a siNA molecule of the invention under conditions suitable to modulate the expression of the interleukin and/or interleukin receptor gene in the subject or organism whereby the treatment or prevention of neurological, disease, disorder, and/or condition can be achieved. In one embodiment, the invention features contacting the subject or organism with a siNA molecule of the invention via local administration to relevant tissues or cells, such as tissues or cells affected by the neurological disease, disorder, or condition. Non-limiting examples of such tissues include CNS (e.g., brain and spinal cord) or PNS tissues and cells such as glial cells, neurons, astrocytes, microglia, dendrites, etc. In one embodiment, the invention features contacting the subject or organism with a siNA molecule of the invention via systemic administration (such as via intravenous or subcutaneous administration of siNA) to relevant tissues or cells, such as tissues or cells affected by the neurological disease, disorder, or condition. The siNA molecule of the invention can be formulated or conjugated as described herein or otherwise known in the art to target appropriate tissues or cells in the subject or organism.

[0199] In one embodiment, the invention features a method for treating or preventing a proliferative disease, disorder, and/or condition in a subject or organism comprising contacting the subject or organism with a siNA molecule of the invention under conditions suitable to modulate the expression of the interleukin and/or interleukin receptor gene in the subject or organism whereby the treatment or prevention of proliferative, disease, disorder, and/or condition can be achieved. In one embodiment, the invention features contacting the subject or organism with a siNA molecule of the invention via local administration to relevant tissues or cells, such as tissues or cells affected by the proliferative disease, disorder, or condition. Non-limiting examples of such tissues include lung, sinus, or nasopharyngeal tissues and cells, such as airway epithelial cells; gastrointestinal tissues and cells; CNS or PNS tissues and cells; cardiovascular tissues and cells; dermal or subcutaneous tissues and cells; liver tissues and cells; kidney tissues and cells, bladder tissues and cells; colorectal tissues and cells; synovial tissues and cells; musculoskeletal tissues and cells; ocular tissues and cells; lymphatic tissues and cells such as T-cells, B-cells, or macrophages; hematopoetic tissues and cells etc. In one embodiment, the invention features contacting the subject or organism with a siNA molecule of the invention via systemic administration (such as via intravenous or subcutaneous administration of siNA) to relevant tissues or cells, such as tissues or cells affected by the proliferative disease, disorder, or condition. The siNA molecule of the invention can be formulated or conjugated as described herein or otherwise known in the art to target appropriate tissues or cells in the subject or organism.

[0200] In one embodiment, the invention features a method for treating or preventing cancer in a subject or organism comprising contacting the subject or organism with a siNA molecule of the invention under conditions suitable to modulate the expression of the interleukin and/or interleukin receptor gene in the subject or organism whereby the treatment or prevention of cancer can be achieved. In one embodiment, the invention features contacting the subject or organism with a siNA molecule of the invention via local administration to relevant tissues or cells, such as tissues or cells affected by the cancer. Non-limiting examples of such tissues include lung, sinus, or nasopharyngeal tissues and cells, such as airway epithelial cells; gastrointestinal tissues and cells; CNS or PNS tissues and cells; cardiovascular tissues and cells; dermal or subcutaneous tissues and cells; liver tissues and cells; kidney tissues and cells, bladder tissues and cells; colorectal tissues and cells; synovial tissues and cells; musculoskeletal tissues and cells; ocular tissues and cells; lymphatic tissues and cells such as T-cells, B-cells, or macrophages; hematopoetic tissues and cells etc. In one embodiment, the invention features contacting the subject or organism with a siNA molecule of the invention via systemic administration (such as via intravenous or subcutaneous administration of siNA) to relevant tissues or cells, such as tissues or cells affected by the cancer. The siNA molecule of the invention can be formulated or conjugated as described herein or otherwise known in the art to target appropriate tissues or cells in the subject or organism.

[0201] In another embodiment, the invention features a method of modulating the expression of more than one interleukin and/or interleukin receptor gene in a subject or organism comprising contacting the subject or organism with one or more siNA molecules of the invention under conditions suitable to modulate (e.g., inhibit) the expression of the interleukin and/or interleukin receptor genes in the subject or organism.

[0202] In one embodiment, the invention features a method of modulating the expression of a interleukin and/or interleukin receptor target gene in a tissue explant (e.g., skin, hair, lung, or any other tissue or cell as can be transplanted from one organism to another or back to the same organism from which the tissue or cell is derived) comprising: (a) synthesizing a siNA molecule of the invention, which can be chemically-modified, wherein the siNA comprises a single stranded sequence having complementarity to RNA of the interleukin and/or interleukin receptor target gene; and (b) contacting a cell of the tissue explant derived from a particular subject or organism with the siNA molecule under conditions suitable to modulate (e.g., inhibit) the expression of the interleukin and/or interleukin receptor target gene in the tissue explant. In another embodiment, the method further comprises introducing the tissue explant back into the subject or organism the tissue was derived from or into another subject or organism under conditions suitable to modulate (e.g., inhibit) the expression of the interleukin and/or interleukin receptor target gene in that subject or organism.

[0203] In another embodiment, the invention features a method of modulating the expression of more than one interleukin and/or interleukin receptor target gene in a tissue explant (e.g., skin, hair, lung, or any other tissue or cell as can be transplanted from one organism to another or back to the same organism from which the tissue or cell is derived) comprising: (a) synthesizing siNA molecules of the invention, which can be chemically-modified, wherein the siNA comprises a single stranded sequence having complementarity to RNA of the interleukin and/or interleukin receptor target gene; and (b) introducing the siNA molecules into a cell of the tissue explant derived from a particular subject or organism under conditions suitable to modulate (e.g., inhibit) the expression of the interleukin and/or interleukin receptor target genes in the tissue explant. In another embodiment, the method further comprises introducing the tissue explant back into the subject or organism the tissue was derived from or into another subject or organism under conditions suitable to modulate (e.g., inhibit) the expression of the interleukin and/or interleukin receptor target genes in that subject or organism.

[0204] In one embodiment, the invention features a method for treating or preventing a disease, disorder, trait or condition related to gene expression in a subject or organism comprising contacting the subject or organism with a siNA molecule of the invention under conditions suitable to modulate the expression of the interleukin and/or interleukin receptor target gene in the subject or organism. The reduction of gene expression and thus reduction in the level of the respective protein/RNA relieves, to some extent, the symptoms of the disease, disorder, trait or condition.

[0205] In one embodiment, the invention features a method for treating or preventing a dermatological disease, disorder, trait or condition in a subject or organism comprising contacting the subject or organism with a siNA molecule of the invention under conditions suitable to modulate the expression of the interleukin and/or interleukin receptor target gene in the subject or organism whereby the treatment or prevention of the dermatological disease, disorder, trait or condition can be achieved. In one embodiment, the invention features contacting the subject or organism with a siNA molecule of the invention via local administration to relevant tissues or cells, such as cells and tissues involved in the dermatological disease, disorder, trait or condition. In one embodiment, the invention features contacting the subject or organism with a siNA molecule of the invention via systemic administration (such as via intravenous or subcutaneous administration of siNA) to relevant tissues or cells, such as tissues or cells involved in the maintenance or development of the dermatological disease, disorder, trait or condition in a subject or organism. The siNA molecule of the invention can be formulated or conjugated as described herein or otherwise known in the art to interleukin and/or interleukin receptor target appropriate tissues or cells in the subject or organism. The siNA molecule can be combined with other therapeutic treatments and modalities as are known in the art for the treatment of or prevention of dermatological diseases, traits, disorders, or conditions in a subject or organism.

[0206] In any of the methods of treatment of the invention, the siNA can be administered to the subject as a course of treatment, for example administration at various time intervals, such as once per day over the course of treatment, once every two days over the course of treatment, once every three days over the course of treatment, once every four days over the course of treatment, once every five days over the course of treatment, once every six days over the course of treatment, once per week over the course of treatment, once every other week over the course of treatment, once per month over the course of treatment, etc. In one embodiment, the course of treatment is from about one to about 52 weeks or longer (e.g., indefinitely). In one embodiment, the course of treatment is from about one to about 48 months or longer (e.g., indefinitely).

[0207] In any of the methods of treatment of the invention, the siNA can be administered to the subject systemically as described herein or otherwise known in the art. Systemic administration can include, for example, intravenous, subcutaneous, intramuscular, catheterization, nasopharyngeal, transdermal, or gastrointestinal administration as is generally known in the art.

[0208] In any of the methods of treatment of the invention, the siNA can be administered to the subject locally or to local tissues as described herein, either alone as a monotherapy or in combination with additional therapies as are known in the art. Local administration can include, for example, intraocular, periocular, nasopharyngeal, inhalation, nebulization, implantation, dermal/transdermal application, or direct injection to relevant tissues, or any other local administration technique, method or procedure, as is generally known in the art.

[0209] In another embodiment, the invention features a method of modulating the expression of more than one interleukin or interleukin receptor gene in a subject or organism comprising contacting the subject or organism with one or more siNA molecules of the invention under conditions suitable to modulate (e.g., inhibit) the expression of the interleukin and/or interleukin receptor genes in the subject or organism.

[0210] The siNA molecules of the invention can be designed to down regulate or inhibit target (e.g., interleukin and/or interleukin receptor) gene expression through RNAi targeting of a variety of nucleic acid molecules. In one embodiment, the siNA molecules of the invention are used to target various DNA corresponding to a target gene, for example via heterochromatic silencing or transcriptional inhibition. In one embodiment, the siNA molecules of the invention are used to target various RNAs corresponding to a target gene, for example via RNA target cleavage or translational inhibition. Non-limiting examples of such RNAs include messenger RNA (mRNA), non-coding RNA (ncRNA) or regulatory elements (see for example Mattick, 2005, Science, 309, 1527-1528 and Clayerie, 2005, Science, 309, 1529-1530) which includes miRNA and other small RNAs, alternate RNA splice variants of target gene(s), post-transcriptionally modified RNA of target gene(s), pre-mRNA of target gene(s), and/or RNA templates. If alternate splicing produces a family of transcripts that are distinguished by usage of appropriate exons, the instant invention can be used to inhibit gene expression through the appropriate exons to specifically inhibit or to distinguish among the functions of gene family members. For example, a protein that contains an alternatively spliced transmembrane domain can be expressed in both membrane bound and secreted forms. Use of the invention to target the exon containing the transmembrane domain can be used to determine the functional consequences of pharmaceutical targeting of membrane bound as opposed to the secreted form of the protein. Non-limiting examples of applications of the invention relating to targeting these RNA molecules include therapeutic pharmaceutical applications, cosmetic applications, veterinary applications, pharmaceutical discovery applications, molecular diagnostic and gene function applications, and gene mapping, for example using single nucleotide polymorphism mapping with siNA molecules of the invention. Such applications can be implemented using known gene sequences or from partial sequences available from an expressed sequence tag (EST).

[0211] In another embodiment, the siNA molecules of the invention are used to target conserved sequences corresponding to a gene family or gene families such as interleukin and/or interleukin receptor gene families having homologous sequences. As such, siNA molecules targeting multiple interleukin and/or interleukin receptor genes or RNA targets can provide increased therapeutic effect. In one embodiment, the invention features the targeting (cleavage or inhibition of expression or function) of more than one IL or IL-R gene sequence using a single siNA molecule, by targeting the conserved sequences of the targeted IL or IL-R gene.

[0212] In another embodiment, the siNA molecules of the invention are used to target conserved sequences corresponding to a gene family or gene families such as interleukin and/or interleukin receptor family genes. As such, siNA molecules targeting multiple interleukin and/or interleukin receptor targets can provide increased therapeutic effect.

[0213] In addition, siNA can be used to characterize pathways of gene function in a variety of applications. For example, the present invention can be used to inhibit the activity of target gene(s) in a pathway to determine the function of uncharacterized gene(s) in gene function analysis, mRNA function analysis, or translational analysis. The invention can be used to determine potential target gene pathways involved in various diseases and conditions toward pharmaceutical development. The invention can be used to understand pathways of gene expression involved in, for example, the progression and/or maintenance of cancer, inflammatory, respiratory, autoimmune, neurological, cardiovascular, and/or proliferative diseases, traits, and conditions associated with interleukin and/or interleukin receptor gene expression or activity in a subject or organism.

[0214] In one embodiment, siNA molecule(s) and/or methods of the invention are used to down regulate the expression of gene(s) that encode RNA referred to by GenBank Accession, for example, interleukin and/or interleukin receptor genes encoding RNA sequence(s) referred to herein by GenBank Accession number, for example, GenBank Accession Nos. shown in Table I, U.S. Ser. No. 10/923,536 and U.S. Ser. No. 10/923,536 as incorporated by reference herein.

[0215] In one embodiment, the invention features a method comprising: (a) generating a library of siNA constructs having a predetermined complexity; and (b) assaying the siNA constructs of (a) above, under conditions suitable to determine RNAi target sites within the target RNA sequence. In one embodiment, the siNA molecules of (a) have strands of a fixed length, for example, about 23 nucleotides in length. In another embodiment, the siNA molecules of (a) are of differing length, for example having strands of about 15 to about 30 (e.g., about 15, 16, 17, 18, 19, 20, 21, 22, 23, 24, 25, 26, 27, 28, 29, or 30) nucleotides in length. In one embodiment, the assay can comprise a reconstituted in vitro siNA assay as described herein. In another embodiment, the assay can comprise a cell culture system in which target RNA is expressed. In another embodiment, fragments of target RNA are analyzed for detectable levels of cleavage, for example by gel electrophoresis, northern blot analysis, or RNAse protection assays, to determine the most suitable target site(s) within the target RNA sequence. The target RNA sequence can be obtained as is known in the art, for example, by cloning and/or transcription for in vitro systems, and by cellular expression in in vivo systems.

[0216] In one embodiment, the invention features a method comprising: (a) generating a randomized library of siNA constructs having a predetermined complexity, such as of 4^{N}, where N represents the number of base paired nucleotides in each of the siNA construct strands (e.g. for a siNA construct having 21 nucleotide sense and antisense strands with 19 base pairs, the complexity would be 4¹⁹); and (b) assaying the siNA constructs of (a) above, under conditions suitable to determine RNAi target sites within the target interleukin and/or interleukin receptor RNA sequence. In another embodiment, the siNA molecules of (a) have strands of a fixed length, for example about 23 nucleotides in length. In yet another embodiment, the siNA molecules of (a) are of differing length, for example having strands of about 15 to about 30 (e.g., about 15, 16, 17, 18, 19, 20, 21, 22, 23, 24, 25, 26, 27, 28, 29, or 30) nucleotides in length. In one embodiment, the assay can comprise a reconstituted in vitro siNA assay as described in Example 6 herein. In another embodiment, the assay can comprise a cell culture system in which target RNA is expressed. In another embodiment, fragments of interleukin and/or interleukin receptor RNA are analyzed for detectable levels of cleavage, for example, by gel electrophoresis, northern blot analysis, or RNAse protection assays, to determine the most suitable target site(s) within the target interleukin and/or interleukin receptor RNA sequence. The target interleukin and/or interleukin receptor RNA sequence can be obtained as is known in the art, for example, by cloning and/or transcription for in vitro systems, and by cellular expression in in vivo systems.

[0217] In another embodiment, the invention features a method comprising: (a) analyzing the sequence of a RNA target encoded by a target gene; (b) synthesizing one or more sets of siNA molecules having sequence complementary to one or more regions of the RNA of (a); and (c) assaying the siNA molecules of (b) under conditions suitable to determine RNAi targets within the target RNA sequence. In one embodiment, the siNA molecules of (b) have strands of a fixed length, for example about 23 nucleotides in length. In another embodiment, the siNA molecules of (b) are of differing length, for example having strands of about 15 to about 30 (e.g., about 15, 16, 17, 18, 19, 20, 21, 22, 23, 24, 25, 26, 27, 28, 29, or 30) nucleotides in length. In one embodiment, the assay can comprise a reconstituted in vitro siNA assay as described herein. In another embodiment, the assay can comprise a cell culture system in which target RNA is expressed. Fragments of target RNA are analyzed for detectable levels of cleavage, for example by gel electrophoresis, northern blot analysis, or RNAse protection assays, to determine the most suitable target site(s) within the target RNA sequence. The target RNA sequence can be obtained as is known in the art, for example, by cloning and/or transcription for in vitro systems, and by expression in in vivo systems.

[0218] By “target site” is meant a sequence within a target RNA that is “targeted” for cleavage mediated by a siNA construct which contains sequences within its antisense region that are complementary to the target sequence.

[0219] By “detectable level of cleavage” is meant cleavage of target RNA (and formation of cleaved product RNAs) to an extent sufficient to discern cleavage products above the background of RNAs produced by random degradation of the target RNA. Production of cleavage products from 1-5% of the target RNA is sufficient to detect above the background for most methods of detection.

[0220] In one embodiment, the invention features a composition comprising a siNA molecule of the invention, which can be chemically-modified, in a pharmaceutically acceptable carrier or diluent. In another embodiment, the invention features a pharmaceutical composition comprising siNA molecules of the invention, which can be chemically-modified, targeting one or more genes in a pharmaceutically acceptable carrier or diluent. In another embodiment, the invention features a method for diagnosing a disease, trait, or condition in a subject comprising administering to the subject a composition of the invention under conditions suitable for the diagnosis of the disease, trait, or condition in the subject. In another embodiment, the invention features a method for treating or preventing a disease, trait, or condition (e.g., cancer, inflammatory, respiratory, autoimmune, neurological, cardiovascular, and/or proliferative diseases, traits, or conditions) in a subject, comprising administering to the subject a composition of the invention under conditions suitable for the treatment or prevention of the disease, trait, or condition in the subject, alone or in conjunction with one or more other therapeutic compounds.

[0221] In another embodiment, the invention features a method for validating an interleukin and/or interleukin receptor gene target, comprising: (a) synthesizing a siNA molecule of the invention, which can be chemically-modified, wherein one of the siNA strands includes a sequence complementary to RNA of a interleukin and/or interleukin receptor target gene; (b) introducing the siNA molecule into a cell, tissue, subject, or organism under conditions suitable for modulating expression of the interleukin and/or interleukin receptor target gene in the cell, tissue, subject, or organism; and (c) determining the function of the gene by assaying for any phenotypic change in the cell, tissue, subject, or organism.

[0222] In another embodiment, the invention features a method for validating an interleukin and/or interleukin receptor target comprising: (a) synthesizing a siNA molecule of the invention, which can be chemically-modified, wherein one of the siNA strands includes a sequence complementary to RNA of a interleukin and/or interleukin receptor target gene; (b) introducing the siNA molecule into a biological system under conditions suitable for modulating expression of the interleukin and/or interleukin receptor target gene in the biological system; and (c) determining the function of the gene by assaying for any phenotypic change in the biological system.

[0223] By “biological system” is meant, material, in a purified or unpurified form, from biological sources, including but not limited to human or animal, wherein the system comprises the components required for RNAi activity. The term “biological system” includes, for example, a cell, tissue, subject, or organism, or extract thereof. The term biological system also includes reconstituted RNAi systems that can be used in an in vitro setting.

[0224] By “phenotypic change” is meant any detectable change to a cell that occurs in response to contact or treatment with a nucleic acid molecule of the invention (e.g., siNA). Such detectable changes include, but are not limited to, changes in shape, size, proliferation, motility, protein expression or RNA expression or other physical or chemical changes as can be assayed by methods known in the art. The detectable change can also include expression of reporter genes/molecules such as Green Florescent Protein (GFP) or various tags that are used to identify an expressed protein or any other cellular component that can be assayed.

[0225] In one embodiment, the invention features a kit containing a siNA molecule of the invention, which can be chemically-modified, that can be used to modulate the expression of an interleukin and/or interleukin receptor target gene in a biological system, including, for example, in a cell, tissue, subject, or organism. In another embodiment, the invention features a kit containing more than one siNA molecule of the invention, which can be chemically-modified, that can be used to modulate the expression of more than one interleukin and/or interleukin receptor target gene in a biological system, including, for example, in a cell, tissue, subject, or organism.

[0226] In one embodiment, the invention features a cell containing one or more siNA molecules of the invention, which can be chemically-modified. In another embodiment, the cell containing a siNA molecule of the invention is a mammalian cell. In yet another embodiment, the cell containing a siNA molecule of the invention is a human cell.

[0227] In one embodiment, the synthesis of a siNA molecule of the invention, which can be chemically-modified, comprises: (a) synthesis of two complementary strands of the siNA molecule; (b) annealing the two complementary strands together under conditions suitable to obtain a double-stranded siNA molecule. In another embodiment, synthesis of the two complementary strands of the siNA molecule is by solid phase oligonucleotide synthesis. In yet another embodiment, synthesis of the two complementary strands of the siNA molecule is by solid phase tandem oligonucleotide synthesis.

[0228] In one embodiment, the invention features a method for synthesizing a siNA duplex molecule comprising: (a) synthesizing a first oligonucleotide sequence strand of the siNA molecule, wherein the first oligonucleotide sequence strand comprises a cleavable linker molecule that can be used as a scaffold for the synthesis of the second oligonucleotide sequence strand of the siNA; (b) synthesizing the second oligonucleotide sequence strand of siNA on the scaffold of the first oligonucleotide sequence strand, wherein the second oligonucleotide sequence strand further comprises a chemical moiety than can be used to purify the siNA duplex; (c) cleaving the linker molecule of (a) under conditions suitable for the two siNA oligonucleotide strands to hybridize and form a stable duplex; and (d) purifying the siNA duplex utilizing the chemical moiety of the second oligonucleotide sequence strand. In one embodiment, cleavage of the linker molecule in (c) above takes place during deprotection of the oligonucleotide, for example, under hydrolysis conditions using an alkylamine base such as methylamine. In one embodiment, the method of synthesis comprises solid phase synthesis on a solid support such as controlled pore glass (CPG) or polystyrene, wherein the first sequence of (a) is synthesized on a cleavable linker, such as a succinyl linker, using the solid support as a scaffold. The cleavable linker in (a) used as a scaffold for synthesizing the second strand can comprise similar reactivity as the solid support derivatized linker, such that cleavage of the solid support derivatized linker and the cleavable linker of (a) takes place concomitantly. In another embodiment, the chemical moiety of (b) that can be used to isolate the attached oligonucleotide sequence comprises a trityl group, for example a dimethoxytrityl group, which can be employed in a trityl-on synthesis strategy as described herein. In yet another embodiment, the chemical moiety, such as a dimethoxytrityl group, is removed during purification, for example, using acidic conditions.

[0229] In a further embodiment, the method for siNA synthesis is a solution phase synthesis or hybrid phase synthesis wherein both strands of the siNA duplex are synthesized in tandem using a cleavable linker attached to the first sequence which acts a scaffold for synthesis of the second sequence. Cleavage of the linker under conditions suitable for hybridization of the separate siNA sequence strands results in formation of the double-stranded siNA molecule.

[0230] In another embodiment, the invention features a method for synthesizing a siNA duplex molecule comprising: (a) synthesizing one oligonucleotide sequence strand of the siNA molecule, wherein the sequence comprises a cleavable linker molecule that can be used as a scaffold for the synthesis of another oligonucleotide sequence; (b) synthesizing a second oligonucleotide sequence having complementarity to the first sequence strand on the scaffold of (a), wherein the second sequence comprises the other strand of the double-stranded siNA molecule and wherein the second sequence further comprises a chemical moiety than can be used to isolate the attached oligonucleotide sequence; (c) purifying the product of (b) utilizing the chemical moiety of the second oligonucleotide sequence strand under conditions suitable for isolating the full-length sequence comprising both siNA oligonucleotide strands connected by the cleavable linker and under conditions suitable for the two siNA oligonucleotide strands to hybridize and form a stable duplex. In one embodiment, cleavage of the linker molecule in (c) above takes place during deprotection of the oligonucleotide, for example, under hydrolysis conditions. In another embodiment, cleavage of the linker molecule in (c) above takes place after deprotection of the oligonucleotide. In another embodiment, the method of synthesis comprises solid phase synthesis on a solid support such as controlled pore glass (CPG) or polystyrene, wherein the first sequence of (a) is synthesized on a cleavable linker, such as a succinyl linker, using the solid support as a scaffold. The cleavable linker in (a) used as a scaffold for synthesizing the second strand can comprise similar reactivity or differing reactivity as the solid support derivatized linker, such that cleavage of the solid support derivatized linker and the cleavable linker of (a) takes place either concomitantly or sequentially. In one embodiment, the chemical moiety of (b) that can be used to isolate the attached oligonucleotide sequence comprises a trityl group, for example a dimethoxytrityl group.

[0231] In another embodiment, the invention features a method for making a double-stranded siNA molecule in a single synthetic process comprising: (a) synthesizing an oligonucleotide having a first and a second sequence, wherein the first sequence is complementary to the second sequence, and the first oligonucleotide sequence is linked to the second sequence via a cleavable linker, and wherein a terminal 5′-protecting group, for example, a 5′-O-dimethoxytrityl group (5′-O-DMT) remains on the oligonucleotide having the second sequence; (b) deprotecting the oligonucleotide whereby the deprotection results in the cleavage of the linker joining the two oligonucleotide sequences; and (c) purifying the product of (b) under conditions suitable for isolating the double-stranded siNA molecule, for example using a trityl-on synthesis strategy as described herein.

[0232] In another embodiment, the method of synthesis of siNA molecules of the invention comprises the teachings of Scaringe et al., U.S. Pat. Nos. 5,889,136; 6,008,400; and 6,111,086, incorporated by reference herein in their entirety.

[0233] In one embodiment, the invention features siNA constructs that mediate RNAi against interleukin and/or interleukin receptor target polynucleotide (e.g., interleukin and/or interleukin RNA or DNA), wherein the siNA construct comprises one or more chemical modifications, for example, one or more chemical modifications having any of Formulae I-VII or any combination thereof that increases the nuclease resistance of the siNA construct.

[0234] In another embodiment, the invention features a method for generating siNA molecules with increased nuclease resistance comprising (a) introducing nucleotides having any of Formula I-VII or any combination thereof into a siNA molecule, and (b) assaying the siNA molecule of step (a) under conditions suitable for isolating siNA molecules having increased nuclease resistance.

[0235] In another embodiment, the invention features a method for generating siNA molecules with improved toxicologic profiles (e.g., having attenuated or no immunstimulatory properties) comprising (a) introducing nucleotides having any of Formula I-VII (e.g., siNA motifs referred to in Table IV) or any combination thereof into a siNA molecule, and (b) assaying the siNA molecule of step (a) under conditions suitable for isolating siNA molecules having improved toxicologic profiles.

[0236] In another embodiment, the invention features a method for generating siNA formulations with improved toxicologic profiles (e.g., having attenuated or no immunstimulatory properties) comprising (a) generating a siNA formulation comprising a siNA molecule of the invention and a delivery vehicle or delivery particle as described herein or as otherwise known in the art, and (b) assaying the siNA formulation of step (a) under conditions suitable for isolating siNA formulations having improved toxicologic profiles.

[0237] In another embodiment, the invention features a method for generating siNA molecules that do not stimulate an interferon response (e.g., no interferon response or attenuated interferon response) in a cell, subject, or organism, comprising (a) introducing nucleotides having any of Formula I-VII (e.g., siNA motifs referred to in Table IV) or any combination thereof into a siNA molecule, and (b) assaying the siNA molecule of step (a) under conditions suitable for isolating siNA molecules that do not stimulate an interferon response.

[0238] In another embodiment, the invention features a method for generating siNA formulations that do not stimulate an interferon response (e.g., no interferon response or attenuated interferon response) in a cell, subject, or organism, comprising (a) generating a siNA formulation comprising a siNA molecule of the invention and a delivery vehicle or delivery particle as described herein or as otherwise known in the art, and (b) assaying the siNA formulation of step (a) under conditions suitable for isolating siNA formulations that do not stimulate an interferon response. In one embodiment, the interferon comprises interferon alpha.

[0239] In another embodiment, the invention features a method for generating siNA molecules that do not stimulate an inflammatory or proinflammatory cytokine response (e.g., no cytokine response or attenuated cytokine response) in a cell, subject, or organism, comprising (a) introducing nucleotides having any of Formula I-VII (e.g., siNA motifs referred to in Table I) or any combination thereof into a siNA molecule, and (b) assaying the siNA molecule of step (a) under conditions suitable for isolating siNA molecules that do not stimulate a cytokine response. In one embodiment, the cytokine comprises an interleukin such as interleukin-6 (IL-6) and/or tumor necrosis alpha (TNF-a).

[0240] In another embodiment, the invention features a method for generating siNA formulations that do not stimulate an inflammatory or proinflammatory cytokine response (e.g., no cytokine response or attenuated cytokine response) in a cell, subject, or organism, comprising (a) generating a siNA formulation comprising a siNA molecule of the invention and a delivery vehicle or delivery particle as described herein or as otherwise known in the art, and (b) assaying the siNA formulation of step (a) under conditions suitable for isolating siNA formulations that do not stimulate a cytokine response. In one embodiment, the cytokine comprises an interleukin such as interleukin-6 (IL-6) and/or tumor necrosis alpha (TNF-a).

[0241] In another embodiment, the invention features a method for generating siNA molecules that do not stimulate Toll-like Receptor (TLR) response (e.g., no TLR response or attenuated TLR response) in a cell, subject, or organism, comprising (a) introducing nucleotides having any of Formula I-VII (e.g., siNA motifs referred to in Table I) or any combination thereof into a siNA molecule, and (b) assaying the siNA molecule of step (a) under conditions suitable for isolating siNA molecules that do not stimulate a TLR response. In one embodiment, the TLR comprises TLR3, TLR7, TLR8 and/or TLR9.

[0242] In another embodiment, the invention features a method for generating siNA formulations that do not stimulate a Toll-like Receptor (TLR) response (e.g., no TLR response or attenuated TLR response) in a cell, subject, or organism, comprising (a) generating a siNA formulation comprising a siNA molecule of the invention and a delivery vehicle or delivery particle as described herein or as otherwise known in the art, and (b) assaying the siNA formulation of step (a) under conditions suitable for isolating siNA formulations that do not stimulate a TLR response. In one embodiment, the TLR comprises TLR3, TLR7, TLR8 and/or TLR9.

[0243] In one embodiment, the invention features a chemically synthesized double stranded short interfering nucleic acid (siNA) molecule that directs cleavage of a target RNA via RNA interference (RNAi), wherein: (a) each strand of said siNA molecule is about 18 to about 38 nucleotides in length; (b) one strand of said siNA molecule comprises nucleotide sequence having sufficient complementarity to said target RNA for the siNA molecule to direct cleavage of the target RNA via RNA interference; and (c) wherein the nucleotide positions within said siNA molecule are chemically modified to reduce the immunstimulatory properties of the siNA molecule to a level below that of a corresponding unmodified siRNA molecule. Such siNA molecules are said to have an improved toxicologic profile compared to an unmodified or minimally modified siNA.

[0244] By “improved toxicologic profile”, is meant that the chemically modified or formulated siNA construct exhibits decreased toxicity in a cell, subject, or organism compared to an unmodified or unformulated siNA, or siNA molecule having fewer modifications or modifications that are less effective in imparting improved toxicology. In a non-limiting example, siNA molecules and formulations with improved toxicologic profiles are associated with reduced immunostimulatory properties, such as a reduced, decreased or attenuated immunostimulatory response in a cell, subject, or organism compared to an unmodified or unformulated siNA, or siNA molecule having fewer modifications or modifications that are less effective in imparting improved toxicology. Such an improved toxicologic profile is characterized by abrogated or reduced immunostimulation, such as reduction or abrogation of induction of interferons (e.g., interferon alpha), inflammatory cytokines (e.g., interleukins such as IL-6, and/or TNF-alpha), and/or toll like receptors (e.g., TLR-3, TLR-7, TLR-8, and/or TLR-9). In one embodiment, a siNA molecule or formulation with an improved toxicological profile comprises no ribonucleotides. In one embodiment, a siNA molecule or formulation with an improved toxicological profile comprises less than 5 ribonucleotides (e.g., 1, 2, 3, or 4 ribonucleotides). In one embodiment, a siNA molecule or formulation with an improved toxicological profile comprises Stab 7, Stab 8, Stab 11, Stab 12, Stab 13, Stab 16, Stab 17, Stab 18, Stab 19, Stab 20, Stab 23, Stab 24, Stab 25, Stab 26, Stab 27, Stab 28, Stab 29, Stab 30, Stab 31, Stab 32, Stab 33, Stab 34 or any combination thereof (see Table IV). In one embodiment, the level of immunostimulatory response associated with a given siNA molecule can be measured as is known in the art, for example by determining the level of PKR/interferon response, proliferation, B-cell activation, and/or cytokine production in assays to quantitate the immunostimulatory response of particular siNA molecules (see, for example, Leifer et al., 2003, J Immunother. 26, 313-9; and U.S. Pat. No. 5,968,909, incorporated in its entirety by reference). Herein, numeric Stab chemistries include both 2′-fluoro and 2′-OCF3 versions of the chemistries shown in Table IV. For example, “Stab 7/8” refers to both Stab 7/8 and Stab 7F/8F etc. In one embodiment, a siNA molecule or formulation with an improved toxicological profile comprises a siNA molecule of the invention and a formulation as described in United States Patent Application Publication No. 20030077829, incorporated by reference herein in its entirety including the drawings.

[0245] In one embodiment, the level of immunostimulatory response associated with a given siNA molecule can be measured as is described herein or as is otherwise known in the art, for example by determining the level of PKR/interferon response, proliferation, B-cell activation, and/or cytokine production in assays to quantitate the immunostimulatory response of particular siNA molecules (see, for example, Leifer et al., 2003, J Immunother. 26, 313-9; and U.S. Pat. No. 5,968,909, incorporated in its entirety by reference). In one embodiment, the reduced immunostimulatory response is between about 10% and about 100% compared to an unmodified or minimally modified siRNA molecule, e.g., about 10%, 20%, 30%, 40%, 50%, 60%, 70%, 80%, 90% or 100% reduced immunostimulatory response. In one embodiment, the immunostimulatory response associated with a siNA molecule can be modulated by the degree of chemical modification. For example, a siNA molecule having between about 10% and about 100%, e.g., about 10%, 20%, 30%, 40%, 50%, 60%, 70%, 80%, 90% or 100% of the nucleotide positions in the siNA molecule modified can be selected to have a corresponding degree of immunostimulatory properties as described herein.

[0246] In one embodiment, the invention features a chemically synthesized double stranded siNA molecule that directs cleavage of a target RNA via RNA interference (RNAi), wherein (a) each strand of said siNA molecule is about 18 to about 38 nucleotides in length; (b) one strand of said siNA molecule comprises nucleotide sequence having sufficient complementarity to said target RNA for the siNA molecule to direct cleavage of the target RNA via RNA interference; and (c) wherein one or more nucleotides of said siNA molecule are chemically modified to reduce the immunostimulatory properties of the siNA molecule to a level below that of a corresponding unmodified siNA molecule. In one embodiment, each strand comprises at least about 18 nucleotides that are complementary to the nucleotides of the other strand.

[0247] In another embodiment, the siNA molecule comprising modified nucleotides to reduce the immunostimulatory properties of the siNA molecule comprises an antisense region having nucleotide sequence that is complementary to a nucleotide sequence of a target gene or a portion thereof and further comprises a sense region, wherein said sense region comprises a nucleotide sequence substantially similar to the nucleotide sequence of said target gene or portion thereof. In one embodiment thereof, the antisense region and the sense region comprise about 18 to about 38 nucleotides, wherein said antisense region comprises at least about 18 nucleotides that are complementary to nucleotides of the sense region. In one embodiment thereof, the pyrimidine nucleotides in the sense region are 2′-O-methylpyrimidine nucleotides. In another embodiment thereof, the purine nucleotides in the sense region are 2′-deoxy purine nucleotides. In yet another embodiment thereof, the pyrimidine nucleotides present in the sense region are 2′-deoxy-2′-fluoro pyrimidine nucleotides. In another embodiment thereof, the pyrimidine nucleotides of said antisense region are 2′-deoxy-2′-fluoro pyrimidine nucleotides. In yet another embodiment thereof, the purine nucleotides of said antisense region are 2′-O-methyl purine nucleotides. In still another embodiment thereof, the purine nucleotides present in said antisense region comprise 2′-deoxypurine nucleotides. In another embodiment, the antisense region comprises a phosphorothioate internucleotide linkage at the 3′ end of said antisense region. In another embodiment, the antisense region comprises a glyceryl modification at a 3′ end of said antisense region.

[0248] In other embodiments, the siNA molecule comprising modified nucleotides to reduce the immunostimulatory properties of the siNA molecule can comprise any of the structural features of siNA molecules described herein. In other embodiments, the siNA molecule comprising modified nucleotides to reduce the immunostimulatory properties of the siNA molecule can comprise any of the chemical modifications of siNA molecules described herein.

[0249] In one embodiment, the invention features a method for generating a chemically synthesized double stranded siNA molecule having chemically modified nucleotides to reduce the immunostimulatory properties of the siNA molecule, comprising (a) introducing one or more modified nucleotides in the siNA molecule, and (b) assaying the siNA molecule of step (a) under conditions suitable for isolating an siNA molecule having reduced immunostimulatory properties compared to a corresponding siNA molecule having unmodified nucleotides. Each strand of the siNA molecule is about 18 to about 38 nucleotides in length. One strand of the siNA molecule comprises nucleotide sequence having sufficient complementarity to the target RNA for the siNA molecule to direct cleavage of the target RNA via RNA interference. In one embodiment, the reduced immunostimulatory properties comprise an abrogated or reduced induction of inflammatory or proinflammatory cytokines, such as interleukin-6 (IL-6) or tumor necrosis alpha (TNF-a), in response to the siNA being introduced in a cell, tissue, or organism. In another embodiment, the reduced immunostimulatory properties comprise an abrogated or reduced induction of Toll Like Receptors (TLRs), such as TLR3, TLR7, TLR8 or TLR9, in response to the siNA being introduced in a cell, tissue, or organism.

[0250] In another embodiment, the reduced immunostimulatory properties comprise an abrogated or reduced induction of interferons, such as interferon alpha, in response to the siNA being introduced in a cell, tissue, or organism.

[0251] In one embodiment, the invention features siNA constructs that mediate RNAi against interleukin and/or interleukin receptor target polynucleotide, wherein the siNA construct comprises one or more chemical modifications described herein that modulates the binding affinity between the sense and antisense strands of the siNA construct.

[0252] In another embodiment, the invention features a method for generating siNA molecules with increased binding affinity between the sense and antisense strands of the siNA molecule comprising (a) introducing nucleotides having any of Formula I-VII or any combination thereof into a siNA molecule, and (b) assaying the siNA molecule of step (a) under conditions suitable for isolating siNA molecules having increased binding affinity between the sense and antisense strands of the siNA molecule.

[0253] In one embodiment, the invention features siNA constructs that mediate RNAi against interleukin and/or interleukin receptor target polynucleotide, wherein the siNA construct comprises one or more chemical modifications described herein that modulates the binding affinity between the antisense strand of the siNA construct and a complementary target RNA sequence within a cell.

[0254] In one embodiment, the invention features siNA constructs that mediate RNAi against interleukin and/or interleukin receptor target polynucleotide, wherein the siNA construct comprises one or more chemical modifications described herein that modulates the binding affinity between the antisense strand of the siNA construct and a complementary target DNA sequence within a cell.

[0255] In another embodiment, the invention features a method for generating siNA molecules with increased binding affinity between the antisense strand of the siNA molecule and a complementary target RNA sequence comprising (a) introducing nucleotides having any of Formula I-VII or any combination thereof into a siNA molecule, and (b) assaying the siNA molecule of step (a) under conditions suitable for isolating siNA molecules having increased binding affinity between the antisense strand of the siNA molecule and a complementary target RNA sequence.

[0256] In another embodiment, the invention features a method for generating siNA molecules with increased binding affinity between the antisense strand of the siNA molecule and a complementary target DNA sequence comprising (a) introducing nucleotides having any of Formula I-VII or any combination thereof into a siNA molecule, and (b) assaying the siNA molecule of step (a) under conditions suitable for isolating siNA molecules having increased binding affinity between the antisense strand of the siNA molecule and a complementary target DNA sequence.

[0257] In one embodiment, the invention features siNA constructs that mediate RNAi against interleukin and/or interleukin receptor target polynucleotide, wherein the siNA construct comprises one or more chemical modifications described herein that modulate the polymerase activity of a cellular polymerase capable of generating additional endogenous siNA molecules having sequence homology to the chemically-modified siNA construct.

[0258] In another embodiment, the invention features a method for generating siNA molecules capable of mediating increased polymerase activity of a cellular polymerase capable of generating additional endogenous siNA molecules having sequence homology to a chemically-modified siNA molecule comprising (a) introducing nucleotides having any of Formula I-VII or any combination thereof into a siNA molecule, and (b) assaying the siNA molecule of step (a) under conditions suitable for isolating siNA molecules capable of mediating increased polymerase activity of a cellular polymerase capable of generating additional endogenous siNA molecules having sequence homology to the chemically-modified siNA molecule.

[0259] In one embodiment, the invention features chemically-modified siNA constructs that mediate RNAi against interleukin and/or interleukin receptor target polynucleotide in a cell, wherein the chemical modifications do not significantly effect the interaction of siNA with a target RNA molecule, DNA molecule and/or proteins or other factors that are essential for RNAi in a manner that would decrease the efficacy of RNAi mediated by such siNA constructs.

[0260] In another embodiment, the invention features a method for generating siNA molecules with improved RNAi activity against interleukin and/or interleukin receptor comprising (a) introducing nucleotides having any of Formula I-VII or any combination thereof into a siNA molecule, and (b) assaying the siNA molecule of step (a) under conditions suitable for isolating siNA molecules having improved RNAi activity. In another embodiment, the invention features a method for generating siNA molecules with improved RNAi specificity against interleukin and/or interleukin receptor polynucleotide targets comprising (a) introducing nucleotides having any of Formula I-VII or any combination thereof into a siNA molecule, and (b) assaying the siNA molecule of step (a) under conditions suitable for isolating siNA molecules having improved RNAi specificity. In one embodiment, improved specificity comprises having reduced off target effects compared to an unmodified siNA molecule. For example, introduction of terminal cap moieties at the 3′-end, 5′-end, or both 3′ and 5′-ends of the sense strand or region of a siNA molecule of the invention can direct the siNA to have improved specificity by preventing the sense strand or sense region from acting as a template for RNAi activity against a corresponding target having complementarity to the sense strand or sense region.

[0261] In another embodiment, the invention features a method for generating siNA molecules with improved RNAi activity against interleukin and/or interleukin receptor target RNA comprising (a) introducing nucleotides having any of Formula I-VII or any combination thereof into a siNA molecule, and (b) assaying the siNA molecule of step (a) under conditions suitable for isolating siNA molecules having improved RNAi activity against the interleukin and/or interleukin receptor target RNA.

[0262] In another embodiment, the invention features a method for generating siNA molecules with improved RNAi activity against interleukin and/or interleukin receptor target polynucleotide comprising (a) introducing nucleotides having any of Formula I-VII or any combination thereof into a siNA molecule, and (b) assaying the siNA molecule of step (a) under conditions suitable for isolating siNA molecules having improved RNAi activity.

[0263] In yet another embodiment, the invention features a method for generating siNA molecules with improved RNAi activity against a interleukin and/or interleukin receptor target RNA comprising (a) introducing nucleotides having any of Formula I-VII or any combination thereof into a siNA molecule, and (b) assaying the siNA molecule of step (a) under conditions suitable for isolating siNA molecules having improved RNAi activity against the interleukin and/or interleukin receptor target RNA.

[0264] In yet another embodiment, the invention features a method for generating siNA molecules with improved RNAi activity against interleukin and/or interleukin receptor target DNA comprising (a) introducing nucleotides having any of Formula I-VII or any combination thereof into a siNA molecule, and (b) assaying the siNA molecule of step (a) under conditions suitable for isolating siNA molecules having improved RNAi activity against the target DNA.

[0265] In one embodiment, the invention features siNA constructs that mediate RNAi against interleukin and/or interleukin receptor target polynucleotide, wherein the siNA construct comprises one or more chemical modifications described herein that modulates the cellular uptake of the siNA construct, such as cholesterol conjugation of the siNA.

[0266] In another embodiment, the invention features a method for generating siNA molecules against interleukin and/or interleukin receptor target polynucleotide with improved cellular uptake comprising (a) introducing nucleotides having any of Formula I-VII or any combination thereof into a siNA molecule, and (b) assaying the siNA molecule of step (a) under conditions suitable for isolating siNA molecules having improved cellular uptake.

[0267] In one embodiment, the invention features siNA constructs that mediate RNAi against interleukin and/or interleukin receptor target polynucleotide, wherein the siNA construct comprises one or more chemical modifications described herein that increases the bioavailability of the siNA construct, for example, by attaching polymeric conjugates such as polyethyleneglycol or equivalent conjugates that improve the pharmacokinetics of the siNA construct, or by attaching conjugates that target specific tissue types or cell types in vivo. Non-limiting examples of such conjugates are described in Vargeese et al., U.S. Ser. No. 10/201,394 incorporated by reference herein.

[0268] In one embodiment, the invention features a method for generating siNA molecules of the invention with improved bioavailability comprising (a) introducing a conjugate into the structure of a siNA molecule, and (b) assaying the siNA molecule of step (a) under conditions suitable for isolating siNA molecules having improved bioavailability. Such conjugates can include ligands for cellular receptors, such as peptides derived from naturally occurring protein ligands; protein localization sequences, including cellular ZIP code sequences; antibodies; nucleic acid aptamers; vitamins and other co-factors, such as folate and N-acetylgalactosamine; polymers, such as polyethyleneglycol (PEG); phospholipids; cholesterol; cholesterol derivatives, polyamines, such as spermine or spermidine; and others.

[0269] In one embodiment, the invention features a double stranded short interfering nucleic acid (siNA) molecule that comprises a first nucleotide sequence complementary to a target RNA sequence or a portion thereof, and a second sequence having complementarity to said first sequence, wherein said second sequence is chemically modified in a manner that it can no longer act as a guide sequence for efficiently mediating RNA interference and/or be recognized by cellular proteins that facilitate RNAi. In one embodiment, the first nucleotide sequence of the siNA is chemically modified as described herein. In one embodiment, the first nucleotide sequence of the siNA is not modified (e.g., is all RNA).

[0270] In one embodiment, the invention features a double stranded short interfering nucleic acid (siNA) molecule that comprises a first nucleotide sequence complementary to a target RNA sequence or a portion thereof, and a second sequence having complementarity to said first sequence, wherein the second sequence is designed or modified in a manner that prevents its entry into the RNAi pathway as a guide sequence or as a sequence that is complementary to a target nucleic acid (e.g., RNA) sequence. In one embodiment, the first nucleotide sequence of the siNA is chemically modified as described herein. In one embodiment, the first nucleotide sequence of the siNA is not modified (e.g., is all RNA). Such design or modifications are expected to enhance the activity of siNA and/or improve the specificity of siNA molecules of the invention. These modifications are also expected to minimize any off-target effects and/or associated toxicity.

[0271] In one embodiment, the invention features a double stranded short interfering nucleic acid (siNA) molecule that comprises a first nucleotide sequence complementary to a target RNA sequence or a portion thereof, and a second sequence having complementarity to said first sequence, wherein said second sequence is incapable of acting as a guide sequence for mediating RNA interference. In one embodiment, the first nucleotide sequence of the siNA is chemically modified as described herein. In one embodiment, the first nucleotide sequence of the siNA is not modified (e.g., is all RNA).

[0272] In one embodiment, the invention features a double stranded short interfering nucleic acid (siNA) molecule that comprises a first nucleotide sequence complementary to a target RNA sequence or a portion thereof, and a second sequence having complementarity to said first sequence, wherein said second sequence does not have a terminal 5′-hydroxyl (5′-OH) or 5′-phosphate group.

[0273] In one embodiment, the invention features a double stranded short interfering nucleic acid (siNA) molecule that comprises a first nucleotide sequence complementary to a target RNA sequence or a portion thereof, and a second sequence having complementarity to said first sequence, wherein said second sequence comprises a terminal cap moiety at the 5′-end of said second sequence. In one embodiment, the terminal cap moiety comprises an inverted abasic, inverted deoxy abasic, inverted nucleotide moiety, a group shown in FIG. 10, an alkyl or cycloalkyl group, a heterocycle, or any other group that prevents RNAi activity in which the second sequence serves as a guide sequence or template for RNAi.

[0274] In one embodiment, the invention features a double stranded short interfering nucleic acid (siNA) molecule that comprises a first nucleotide sequence complementary to a target RNA sequence or a portion thereof, and a second sequence having complementarity to said first sequence, wherein said second sequence comprises a terminal cap moiety at the 5′-end and 3′-end of said second sequence. In one embodiment, each terminal cap moiety individually comprises an inverted abasic, inverted deoxy abasic, inverted nucleotide moiety, a group shown in FIG. 10, an alkyl or cycloalkyl group, a heterocycle, or any other group that prevents RNAi activity in which the second sequence serves as a guide sequence or template for RNAi.

[0275] In one embodiment, the invention features a method for generating siNA molecules of the invention with improved specificity for down regulating or inhibiting the expression of a target nucleic acid (e.g., a DNA or RNA such as a gene or its corresponding RNA), comprising (a) introducing one or more chemical modifications into the structure of a siNA molecule, and (b) assaying the siNA molecule of step (a) under conditions suitable for isolating siNA molecules having improved specificity. In another embodiment, the chemical modification used to improve specificity comprises terminal cap modifications at the 5′-end, 3′-end, or both 5′ and 3′-ends of the siNA molecule. The terminal cap modifications can comprise, for example, structures shown in FIG. 10 (e.g. inverted deoxyabasic moieties) or any other chemical modification that renders a portion of the siNA molecule (e.g. the sense strand) incapable of mediating RNA interference against an off target nucleic acid sequence. In a non-limiting example, a siNA molecule is designed such that only the antisense sequence of the siNA molecule can serve as a guide sequence for RISC mediated degradation of a corresponding target RNA sequence. This can be accomplished by rendering the sense sequence of the siNA inactive by introducing chemical modifications to the sense strand that preclude recognition of the sense strand as a guide sequence by RNAi machinery. In one embodiment, such chemical modifications comprise any chemical group at the 5′-end of the sense strand of the siNA, or any other group that serves to render the sense strand inactive as a guide sequence for mediating RNA interference. These modifications, for example, can result in a molecule where the 5′-end of the sense strand no longer has a free 5′-hydroxyl (5′-OH) or a free 5′-phosphate group (e.g., phosphate, diphosphate, triphosphate, cyclic phosphate etc.). Non-limiting examples of such siNA constructs are described herein, such as “Stab 9/10”, “Stab 7/8”, “Stab 7/19”, “Stab 17/22”, “Stab 23/24”, “Stab 24/25”, and “Stab 24/26” (e.g., any siNA having Stab 7, 9, 17, 23, or 24 sense strands) chemistries and variants thereof (see Table IV) wherein the 5′-end and 3′-end of the sense strand of the siNA do not comprise a hydroxyl group or phosphate group. Herein, numeric Stab chemistries include both 2′-fluoro and 2′-OCF3 versions of the chemistries shown in Table IV. For example, “Stab 7/8” refers to both Stab 7/8 and Stab 7F/8F etc.

[0276] In one embodiment, the invention features a method for generating siNA molecules of the invention with improved specificity for down regulating or inhibiting the expression of a target nucleic acid (e.g., a DNA or RNA such as a gene or its corresponding RNA), comprising introducing one or more chemical modifications into the structure of a siNA molecule that prevent a strand or portion of the siNA molecule from acting as a template or guide sequence for RNAi activity. In one embodiment, the inactive strand or sense region of the siNA molecule is the sense strand or sense region of the siNA molecule, i.e. the strand or region of the siNA that does not have complementarity to the target nucleic acid sequence. In one embodiment, such chemical modifications comprise any chemical group at the 5′-end of the sense strand or region of the siNA that does not comprise a 5′-hydroxyl (5′-OH) or 5′-phosphate group, or any other group that serves to render the sense strand or sense region inactive as a guide sequence for mediating RNA interference. Non-limiting examples of such siNA constructs are described herein, such as “Stab 9/10”, “Stab 7/8”, “Stab 7/19”, “Stab 17/22”, “Stab 23/24”, “Stab 24/25”, and “Stab 24/26” (e.g., any siNA having Stab 7, 9, 17, 23, or 24 sense strands) chemistries and variants thereof (see Table IV) wherein the 5′-end and 3′-end of the sense strand of the siNA do not comprise a hydroxyl group or phosphate group. Herein, numeric Stab chemistries include both 2′-fluoro and 2′-OCF3 versions of the chemistries shown in Table IV. For example, “Stab 7/8” refers to both Stab 7/8 and Stab 7F/8F etc.

[0277] In one embodiment, the invention features a method for screening siNA molecules that are active in mediating RNA interference against a target nucleic acid sequence comprising (a) generating a plurality of unmodified siNA molecules, (b) screening the siNA molecules of step (a) under conditions suitable for isolating siNA molecules that are active in mediating RNA interference against the target nucleic acid sequence, and (c) introducing chemical modifications (e.g. chemical modifications as described herein or as otherwise known in the art) into the active siNA molecules of (b). In one embodiment, the method further comprises re-screening the chemically modified siNA molecules of step (c) under conditions suitable for isolating chemically modified siNA molecules that are active in mediating RNA interference against the target nucleic acid sequence.

[0278] In one embodiment, the invention features a method for screening chemically modified siNA molecules that are active in mediating RNA interference against a target nucleic acid sequence comprising (a) generating a plurality of chemically modified siNA molecules (e.g. siNA molecules as described herein or as otherwise known in the art), and (b) screening the siNA molecules of step (a) under conditions suitable for isolating chemically modified siNA molecules that are active in mediating RNA interference against the target nucleic acid sequence.

[0279] The term “ligand” refers to any compound or molecule, such as a drug, peptide, hormone, or neurotransmitter, that is capable of interacting with another compound, such as a receptor, either directly or indirectly. The receptor that interacts with a ligand can be present on the surface of a cell or can alternately be an intercellular receptor. Interaction of the ligand with the receptor can result in a biochemical reaction, or can simply be a physical interaction or association.

[0280] In another embodiment, the invention features a method for generating siNA molecules of the invention with improved bioavailability comprising (a) introducing an excipient formulation to a siNA molecule, and (b) assaying the siNA molecule of step (a) under conditions suitable for isolating siNA molecules having improved bioavailability. Such excipients include polymers such as cyclodextrins, lipids, cationic lipids, polyamines, phospholipids, nanoparticles, receptors, ligands, and others.

[0281] In another embodiment, the invention features a method for generating siNA molecules of the invention with improved bioavailability comprising (a) introducing nucleotides having any of Formulae I-VII or any combination thereof into a siNA molecule, and (b) assaying the siNA molecule of step (a) under conditions suitable for isolating siNA molecules having improved bioavailability.

[0282] In another embodiment, polyethylene glycol (PEG) can be covalently attached to siNA compounds of the present invention. The attached PEG can be any molecular weight, preferably from about 100 to about 50,000 daltons (Da).

[0283] The present invention can be used alone or as a component of a kit having at least one of the reagents necessary to carry out the in vitro or in vivo introduction of RNA to test samples and/or subjects. For example, preferred components of the kit include a siNA molecule of the invention and a vehicle that promotes introduction of the siNA into cells of interest as described herein (e.g., using lipids and other methods of transfection known in the art, see for example Beigelman et al, U.S. Pat. No. 6,395,713). The kit can be used for target validation, such as in determining gene function and/or activity, or in drug optimization, and in drug discovery (see for example Usman et al., U.S. Ser. No. 60/402,996). Such a kit can also include instructions to allow a user of the kit to practice the invention.

[0284] The term “short interfering nucleic acid”, “siNA”, “short interfering RNA”, “siRNA”, “short interfering nucleic acid molecule”, “short interfering oligonucleotide molecule”, or “chemically-modified short interfering nucleic acid molecule” as used herein refers to any nucleic acid molecule capable of inhibiting or down regulating gene expression or viral replication, for example by mediating RNA interference “RNAi” or gene silencing in a sequence-specific manner. For example the siNA can be a double-stranded nucleic acid molecule comprising self-complementary sense and antisense regions, wherein the antisense region comprises nucleotide sequence that is complementary to nucleotide sequence in a target nucleic acid molecule or a portion thereof and the sense region having nucleotide sequence corresponding to the target nucleic acid sequence or a portion thereof. The siNA can be assembled from two separate oligonucleotides, where one strand is the sense strand and the other is the antisense strand, wherein the antisense and sense strands are self-complementary (i.e., each strand comprises nucleotide sequence that is complementary to nucleotide sequence in the other strand; such as where the antisense strand and sense strand form a duplex or double stranded structure, for example wherein the double stranded region is about 15 to about 30, e.g., about 15, 16, 17, 18, 19, 20, 21, 22, 23, 24, 25, 26, 27, 28, 29 or 30 base pairs; the antisense strand comprises nucleotide sequence that is complementary to nucleotide sequence in a target nucleic acid molecule or a portion thereof and the sense strand comprises nucleotide sequence corresponding to the target nucleic acid sequence or a portion thereof (e.g., about 15 to about 25 or more nucleotides of the siNA molecule are complementary to the target nucleic acid or a portion thereof). Alternatively, the siNA is assembled from a single oligonucleotide, where the self-complementary sense and antisense regions of the siNA are linked by means of a nucleic acid based or non-nucleic acid-based linker(s). The siNA can be a polynucleotide with a duplex, asymmetric duplex, hairpin or asymmetric hairpin secondary structure, having self-complementary sense and antisense regions, wherein the antisense region comprises nucleotide sequence that is complementary to nucleotide sequence in a separate target nucleic acid molecule or a portion thereof and the sense region having nucleotide sequence corresponding to the target nucleic acid sequence or a portion thereof. The siNA can be a circular single-stranded polynucleotide having two or more loop structures and a stem comprising self-complementary sense and antisense regions, wherein the antisense region comprises nucleotide sequence that is complementary to nucleotide sequence in a target nucleic acid molecule or a portion thereof and the sense region having nucleotide sequence corresponding to the target nucleic acid sequence or a portion thereof, and wherein the circular polynucleotide can be processed either in vivo or in vitro to generate an active siNA molecule capable of mediating RNAi. The siNA can also comprise a single stranded polynucleotide having nucleotide sequence complementary to nucleotide sequence in a target nucleic acid molecule or a portion thereof (for example, where such siNA molecule does not require the presence within the siNA molecule of nucleotide sequence corresponding to the target nucleic acid sequence or a portion thereof), wherein the single stranded polynucleotide can further comprise a terminal phosphate group, such as a 5′-phosphate (see for example Martinez et al., 2002, Cell., 110, 563-574 and Schwarz et al., 2002, Molecular Cell, 10, 537-568), or 5′,3′-diphosphate. In certain embodiments, the siNA molecule of the invention comprises separate sense and antisense sequences or regions, wherein the sense and antisense regions are covalently linked by nucleotide or non-nucleotide linkers molecules as is known in the art, or are alternately non-covalently linked by ionic interactions, hydrogen bonding, van der waals interactions, hydrophobic interactions, and/or stacking interactions. In certain embodiments, the siNA molecules of the invention comprise nucleotide sequence that is complementary to nucleotide sequence of a target gene. In another embodiment, the siNA molecule of the invention interacts with nucleotide sequence of a target gene in a manner that causes inhibition of expression of the target gene. As used herein, siNA molecules need not be limited to those molecules containing only RNA, but further encompasses chemically-modified nucleotides and non-nucleotides. In certain embodiments, the short interfering nucleic acid molecules of the invention lack 2′-hydroxy(2′-OH) containing nucleotides. Applicant describes in certain embodiments short interfering nucleic acids that do not require the presence of nucleotides having a 2′-hydroxy group for mediating RNAi and as such, short interfering nucleic acid molecules of the invention optionally do not include any ribonucleotides (e.g., nucleotides having a 2′-OH group). Such siNA molecules that do not require the presence of ribonucleotides within the siNA molecule to support RNAi can however have an attached linker or linkers or other attached or associated groups, moieties, or chains containing one or more nucleotides with 2′-OH groups. Optionally, siNA molecules can comprise ribonucleotides at about 5, 10, 20, 30, 40, or 50% of the nucleotide positions. The modified short interfering nucleic acid molecules of the invention can also be referred to as short interfering modified oligonucleotides “siMON.” As used herein, the term siNA is meant to be equivalent to other terms used to describe nucleic acid molecules that are capable of mediating sequence specific RNAi, for example short interfering RNA (siRNA), double-stranded RNA (dsRNA), micro-RNA (miRNA), short hairpin RNA (shRNA), short interfering oligonucleotide, short interfering nucleic acid, short interfering modified oligonucleotide, chemically-modified siRNA, post-transcriptional gene silencing RNA (ptgsRNA), and others. Non limiting examples of siNA molecules of the invention are shown in FIGS. 4-6, and Table III herein. Such siNA molecules are distinct from other nucleic acid technologies known in the art that mediate inhibition of gene expression, such as ribozymes, antisense, triplex forming, aptamer, 2,5-A chimera, or decoy oligonucleotides.

[0285] By “RNA interference” or “RNAi” is meant a biological process of inhibiting or down regulating gene expression in a cell as is generally known in the art and which is mediated by short interfering nucleic acid molecules, see for example Zamore and Haley, 2005, Science, 309, 1519-1524; Vaughn and Martienssen, 2005, Science, 309, 1525-1526; see for example Zamore et al., 2000, Cell, 101, 25-33; Bass, 2001, Nature, 411, 428-429; Elbashir et al., 2001, Nature, 411, 494-498; and Kreutzer et al., International PCT Publication No. WO 00/44895; Zernicka-Goetz et al., International PCT Publication No. WO 01/36646; Fire, International PCT Publication No. WO 99/32619; Plaetinck et al., International PCT Publication No. WO 00/01846; Mello and Fire, International PCT Publication No. WO 01/29058; Deschamps-Depaillette, International PCT Publication No. WO 99/07409; and Li et al., International PCT Publication No. WO 00/44914; Allshire, 2002, Science, 297, 1818-1819; Volpe et al., 2002, Science, 297, 1833-1837; Jenuwein, 2002, Science, 297, 2215-2218; and Hall et al., 2002, Science, 297, 2232-2237; Hutvagner and Zamore, 2002, Science, 297, 2056-60; McManus et al., 2002, RNA, 8, 842-850; Reinhart et al., 2002, Gene & Dev., 16, 1616-1626; and Reinhart & Bartel, 2002, Science, 297, 1831). In addition, as used herein, the term RNAi is meant to be equivalent to other terms used to describe sequence specific RNA interference, such as post transcriptional gene silencing, translational inhibition, transcriptional inhibition, or epigenetics. For example, siNA molecules of the invention can be used to epigenetically silence genes at both the post-transcriptional level and the pre-transcriptional level. In a non-limiting example, epigenetic modulation of gene expression by siNA molecules of the invention can result from siNA mediated modification of chromatin structure or methylation patterns to alter gene expression (see, for example, Verdel et al., 2004, Science, 303, 672-676; Pal-Bhadra et al., 2004, Science, 303, 669-672; Allshire, 2002, Science, 297, 1818-1819; Volpe et al., 2002, Science, 297, 1833-1837; Jenuwein, 2002, Science, 297, 2215-2218; and Hall et al., 2002, Science, 297, 2232-2237). In another non-limiting example, modulation of gene expression by siNA molecules of the invention can result from siNA mediated cleavage of RNA (either coding or non-coding RNA) via RISC, or alternately, translational inhibition as is known in the art. In another embodiment, modulation of gene expression by siNA molecules of the invention can result from transcriptional inhibition (see for example Janowski et al., 2005, Nature Chemical Biology, 1, 216-222).

[0286] In one embodiment, a siNA molecule of the invention is a duplex forming oligonucleotide “DFO”, (see for example FIGS. 14-15 and Vaish et al., U.S. Ser. No. 10/727,780 filed Dec. 3, 2003 and International PCT Application No. US04/16390, filed May 24, 2004).

[0287] In one embodiment, a siNA molecule of the invention is a multifunctional siNA, (see for example FIGS. 16-21 and Jadhav et al., U.S. Ser. No. 60/543,480 filed Feb. 10, 2004 and International PCT Application No. US04/16390, filed May 24, 2004). In one embodiment, the multifunctional siNA of the invention can comprise sequence targeting, for example, two or more regions of interleukin and/or interleukin receptor RNA (see for example target sequences in Tables II and III). In one embodiment, the multifunctional siNA of the invention can comprise sequence targeting one or more interleukin and/or interleukin receptor sequences (e.g., IL4, IL4R, IL13, and/or IL13R) coding or non-coding sequences. In one embodiment, the multifunctional siNA of the invention can comprise sequence targeting one or more interleukin and/or interleukin receptor RNA and one or more CHRM3 coding or non-coding sequences (see for example U.S. Ser. No. 10/919,866, incorporated by reference herein). In one embodiment, the multifunctional siNA of the invention can comprise sequence targeting one or more interleukin and/or interleukin receptor RNA and one or more ADAM33 coding or non-coding sequences (see for example U.S. Ser. No. 10/923,329; incorporated by reference herein). In one embodiment, the multifunctional siNA of the invention can comprise sequence targeting one or more interleukin and/or interleukin receptor RNA and one or more GPRA/AAA1 coding or non-coding sequences (see for example U.S. Ser. No. 10/923,182; incorporated by reference herein). In one embodiment, the multifunctional siNA of the invention can comprise sequence targeting one or more interleukin and/or interleukin receptor RNA and one or more ADORA1 coding or non-coding sequences (see for example U.S. Ser. No. 10/224,005; incorporated by reference herein)

[0288] By “asymmetric hairpin” as used herein is meant a linear siNA molecule comprising an antisense region, a loop portion that can comprise nucleotides or non-nucleotides, and a sense region that comprises fewer nucleotides than the antisense region to the extent that the sense region has enough complementary nucleotides to base pair with the antisense region and form a duplex with loop. For example, an asymmetric hairpin siNA molecule of the invention can comprise an antisense region having length sufficient to mediate RNAi in a cell or in vitro system (e.g. about 15 to about 30, or about 15, 16, 17, 18, 19, 20, 21, 22, 23, 24, 25, 26, 27, 28, 29, or 30 nucleotides) and a loop region comprising about 4 to about 12 (e.g., about 4, 5, 6, 7, 8, 9, 10, 11, or 12) nucleotides, and a sense region having about 3 to about 25 (e.g., about 3, 4, 5, 6, 7, 8, 9, 10, 11, 12, 13, 14, 15, 16, 17, 18, 19, 20, 21, 22, 23, 24, or 25) nucleotides that are complementary to the antisense region. The asymmetric hairpin siNA molecule can also comprise a 5′-terminal phosphate group that can be chemically modified. The loop portion of the asymmetric hairpin siNA molecule can comprise nucleotides, non-nucleotides, linker molecules, or conjugate molecules as described herein.

[0289] By “asymmetric duplex” as used herein is meant a siNA molecule having two separate strands comprising a sense region and an antisense region, wherein the sense region comprises fewer nucleotides than the antisense region to the extent that the sense region has enough complementary nucleotides to base pair with the antisense region and form a duplex. For example, an asymmetric duplex siNA molecule of the invention can comprise an antisense region having length sufficient to mediate RNAi in a cell or in vitro system (e.g., about 15 to about 30, or about 15, 16, 17, 18, 19, 20, 21, 22, 23, 24, 25, 26, 27, 28, 29, or 30 nucleotides) and a sense region having about 3 to about 25 (e.g., about 3, 4, 5, 6, 7, 8, 9, 10, 11, 12, 13, 14, 15, 16, 17, 18, 19, 20, 21, 22, 23, 24, or 25) nucleotides that are complementary to the antisense region.

[0290] By “modulate” is meant that the expression of the gene, or level of a RNA molecule or equivalent RNA molecules encoding one or more proteins or protein subunits, or activity of one or more proteins or protein subunits is up regulated or down regulated, such that expression, level, or activity is greater than or less than that observed in the absence of the modulator. For example, the term “modulate” can mean “inhibit,” but the use of the word “modulate” is not limited to this definition.

[0291] By “inhibit”, “down-regulate”, or “reduce”, it is meant that the expression of the gene, or level of RNA molecules or equivalent RNA molecules encoding one or more proteins or protein subunits, or activity of one or more proteins or protein subunits, is reduced below that observed in the absence of the nucleic acid molecules (e.g., siNA) of the invention. In one embodiment, inhibition, down-regulation or reduction with an siNA molecule is below that level observed in the presence of an inactive or attenuated molecule. In another embodiment, inhibition, down-regulation, or reduction with siNA molecules is below that level observed in the presence of, for example, an siNA molecule with scrambled sequence or with mismatches. In another embodiment, inhibition, down-regulation, or reduction of gene expression with a nucleic acid molecule of the instant invention is greater in the presence of the nucleic acid molecule than in its absence. In one embodiment, inhibition, down regulation, or reduction of gene expression is associated with post transcriptional silencing, such as RNAi mediated cleavage of a target nucleic acid molecule (e.g. RNA) or inhibition of translation. In one embodiment, inhibition, down regulation, or reduction of gene expression is associated with pretranscriptional silencing, such as by alterations in DNA methylation patterns and DNA chromatin structure.

[0292] By up-regulate”, or “promote”, it is meant that the expression of the gene, or level of RNA molecules or equivalent RNA molecules encoding one or more proteins or protein subunits, or activity of one or more proteins or protein subunits, is increased above that observed in the absence of the nucleic acid molecules (e.g., siNA) of the invention. In one embodiment, up-regulation or promotion of gene expression with an siNA molecule is above that level observed in the presence of an inactive or attenuated molecule. In another embodiment, up-regulation or promotion of gene expression with siNA molecules is above that level observed in the presence of, for example, an siNA molecule with scrambled sequence or with mismatches. In another embodiment, up-regulation or promotion of gene expression with a nucleic acid molecule of the instant invention is greater in the presence of the nucleic acid molecule than in its absence. In one embodiment, up-regulation or promotion of gene expression is associated with inhibition of RNA mediated gene silencing, such as RNAi mediated cleavage or silencing of a coding or non-coding RNA target that down regulates, inhibits, or silences the expression of the gene of interest to be up-regulated. The down regulation of gene expression can, for example, be induced by a coding RNA or its encoded protein, such as through negative feedback or antagonistic effects. The down regulation of gene expression can, for example, be induced by a non-coding RNA having regulatory control over a gene of interest, for example by silencing expression of the gene via translational inhibition, chromatin structure, methylation, RISC mediated RNA cleavage, or translational inhibition. As such, inhibition or down regulation of targets that down regulate, suppress, or silence a gene of interest can be used to up-regulate or promote expression of the gene of interest toward therapeutic use.

[0293] By “gene”, or “target gene”, is meant a nucleic acid that encodes an RNA, for example, nucleic acid sequences including, but not limited to, structural genes encoding a polypeptide such as interleukin and interleukin receptor genes herein. A gene or target gene can also encode a functional RNA (fRNA) or non-coding RNA (ncRNA), such as small temporal RNA (stRNA), micro RNA (miRNA), small nuclear RNA (snRNA), short interfering RNA (siRNA), small nucleolar RNA (snRNA), ribosomal RNA (rRNA), transfer RNA (tRNA) and precursor RNAs thereof. Such non-coding RNAs can serve as target nucleic acid molecules for siNA mediated RNA interference in modulating the activity of fRNA or ncRNA involved in functional or regulatory cellular processes. Aberrant fRNA or ncRNA activity leading to disease can therefore be modulated by siNA molecules of the invention. siNA molecules targeting fRNA and ncRNA can also be used to manipulate or alter the genotype or phenotype of a subject, organism or cell, by intervening in cellular processes such as genetic imprinting, transcription, translation, or nucleic acid processing (e.g., transamination, methylation etc.). The target gene can be a gene derived from a cell, an endogenous gene, a transgene, or exogenous genes such as genes of a pathogen, for example a virus, which is present in the cell after infection thereof. The cell containing the target gene can be derived from or contained in any organism, for example a plant, animal, protozoan, virus, bacterium, or fungus. Non-limiting examples of plants include monocots, dicots, or gymnosperms. Non-limiting examples of animals include vertebrates or invertebrates. Non-limiting examples of fungi include molds or yeasts. For a review, see for example Snyder and Gerstein, 2003, Science, 300, 258-260.

[0294] By “non-canonical base pair” is meant any non-Watson Crick base pair, such as mismatches and/or wobble base pairs, including flipped mismatches, single hydrogen bond mismatches, trans-type mismatches, triple base interactions, and quadruple base interactions. Non-limiting examples of such non-canonical base pairs include, but are not limited to, AC reverse Hoogsteen, AC wobble, AU reverse Hoogsteen, GU wobble, AA N7 amino, CC 2-carbonyl-amino(H1)-N-3-amino(H2), GA sheared, UC 4-carbonylamino, WU imino-carbonyl, AC reverse wobble, AU Hoogsteen, AU reverse Watson Crick, CG reverse Watson Crick, GC N3-amino-amino N3, AA N1-amino symmetric, AA N7-amino symmetric, GA N7-N1 amino-carbonyl, GA+carbonyl-amino N7-N1, GG N1-carbonyl symmetric, GG N3-amino symmetric, CC carbonyl-amino symmetric, CC N3-amino symmetric, WU 2-carbonyl-imino symmetric, WU 4-carbonyl-imino symmetric, AA amino-N3, AA N1-amino, AC amino 2-carbonyl, AC N3-amino, AC N7-amino, AU amino-4-carbonyl, AU N1-imino, AU N3-imino, AU N7-imino, CC carbonyl-amino, GA amino-N1, GA amino-N7, GA carbonyl-amino, GA N3-amino, GC amino-N3, GC carbonyl-amino, GC N3-amino, GC N7-amino, GG amino-N7, GG carbonyl-imino, GG N7-amino, GU amino-2-carbonyl, GU carbonyl-imino, GU imino-2-carbonyl, GU N7-imino, psiU imino-2-carbonyl, UC 4-carbonyl-amino, UC imino-carbonyl, WU imino-4-carbonyl, AC C2-H—N3, GA carbonyl-C2-H, WU imino-4-carbonyl 2 carbonyl-C5-H, AC amino(A) N3(C)-carbonyl, GC imino amino-carbonyl, Gpsi imino-2-carbonyl amino-2-carbonyl, and GU imino amino-2-carbonyl base pairs.

[0295] By “interleukin” is meant, any interleukin (e.g., IL-1, IL-2, IL-3, IL-4, IL-5, IL-6, IL-7, IL-8, IL-9, IL-10, IL-11, IL-12, IL-13, IL-14, IL-15, IL-16, IL-17, IL-18, IL-19, IL-20, IL-21, IL-22, IL-23, IL-24, IL-25, IL-26, and IL-27) protein, peptide, or polypeptide having any interleukin activity, such as encoded by interleukin Genbank Accession Nos. shown in Table I. The term interleukin also refers to nucleic acid sequences encoding any interleukin protein, peptide, or polypeptide having interleukin activity. The term “interleukin” is also meant to include other interleukin encoding sequence, such as other interleukin isoforms, mutant interleukin genes, splice variants of interleukin genes, and interleukin gene polymorphisms.

[0296] By “interleukin receptor” as used herein is meant, any interleukin receptor (e.g., IL-1R, IL-2R, IL-3R, IL-4R, IL-5R, IL-6R, IL-7R, IL-8R, IL-9R, IL-10R, IL-11R, IL-12R, IL-13R, IL-14R, IL-15R, IL-16R, IL-17R, IL-18R, IL-19R, IL-20R, IL-21R, IL-22R, IL-23R, IL-24R, IL-25R, IL-26R, and IL-27R) protein, peptide, or polypeptide having any interleukin receptor activity, such as encoded by interleukin receptor GenBank Accession Nos. shown in Table I and/or in U.S. Ser. No. 10/923,536 and U.S. Ser. No. 10/923,536, both incorporated by reference herein. The term interleukin receptor also refers to nucleic acid sequences encoding any interleukin receptor protein, peptide, or polypeptide having interleukin receptor activity. The term “interleukin receptor” is also meant to include other interleukin receptor encoding sequence, such as other interleukin receptor isoforms, mutant interleukin receptor genes, splice variants of interleukin receptor genes, and interleukin receptor gene polymorphisms.

[0297] By “corresponding” interleukin receptor is meant, any interleukin receptor that binds to a given interleukin. For example, the corresponding interleukin receptors for IL-4 are IL-4R and IL-13R, as IL-4 is a ligand for both IL-4R and IL-13R.

[0298] By “target” as used herein is meant, any target protein, peptide, or polypeptide (e.g., IL-1, IL-2, IL-3, IL-4, IL-5, IL-6, IL-7, IL-8, IL-9, IL-10, IL-11, IL-12, IL-13, IL-14, IL-15, IL-16, IL-17, IL-18, IL-19, IL-20, IL-21, IL-22, IL-23, IL-24, IL-25, IL-26, and IL-27), such as encoded by GenBank Accession Nos. shown in Table I and/or in U.S. Ser. No. 10/923,536 and U.S. Ser. No. 10/923,536, both incorporated by reference herein. The term “target” also refers to nucleic acid sequences or target polynucleotide sequence encoding any target protein, peptide, or polypeptide, such as proteins, peptides, or polypeptides (e.g., IL-1, IL-2, IL-3, IL-4, IL-5, IL-6, IL-7, IL-8, IL-9, IL-10, IL-11, IL-12, IL-13, IL-14, IL-15, IL-16, IL-17, IL-18, IL-19, IL-20, IL-21, IL-22, IL-23, IL-24, IL-25, IL-26, and IL-27) encoded by sequences having GenBank Accession Nos. shown in Table I and/or in U.S. Ser. No. 10/923,536 and U.S. Ser. No. 10/923,536. The target of interest can include target polynucleotide sequences, such as target DNA or target RNA. The term “target” is also meant to include other sequences, such as differing isoforms, mutant target genes, splice variants of target polynucleotides, target polymorphisms, and non-coding (e.g., ncRNA, miRNA, sRNA) or other regulatory polynucleotide sequences as described herein. Therefore, in various embodiments of the invention, a double stranded nucleic acid molecule of the invention (e.g., siNA) having complementarity to a target RNA can be used to inhibit or down regulate miRNA or other ncRNA activity. In one embodiment, inhibition of miRNA or ncRNA activity can be used to down regulate or inhibit gene expression (e.g., gene targets described herein or otherwise known in the art) or viral replication (e.g., viral targets described herein or otherwise known in the art) that is dependent on miRNA or ncRNA activity. In another embodiment, inhibition of miRNA or ncRNA activity by double stranded nucleic acid molecules of the invention (e.g. siNA) having complementarity to the miRNA or ncRNA can be used to up regulate or promote target gene expression (e.g., gene targets described herein or otherwise known in the art) where the expression of such genes is down regulated, suppressed, or silenced by the miRNA or ncRNA. Such up-regulation of gene expression can be used to treat diseases and conditions associated with a loss of function or haploinsufficiency as are generally known in the art.

[0299] By “homologous sequence” is meant, a nucleotide sequence that is shared by one or more polynucleotide sequences, such as genes, gene transcripts and/or non-coding polynucleotides. For example, a homologous sequence can be a nucleotide sequence that is shared by two or more genes encoding related but different proteins, such as different members of a gene family, different protein epitopes, different protein isoforms or completely divergent genes, such as a cytokine and its corresponding receptors. A homologous sequence can be a nucleotide sequence that is shared by two or more non-coding polynucleotides, such as noncoding DNA or RNA, regulatory sequences, introns, and sites of transcriptional control or regulation. Homologous sequences can also include conserved sequence regions shared by more than one polynucleotide sequence. Homology does not need to be perfect homology (e.g., 100%), as partially homologous sequences are also contemplated by the instant invention (e.g., 99%, 98%, 97%, 96%, 95%, 94%, 93%, 92%, 91%, 90%, 89%, 88%, 87%, 86%, 85%, 84%, 83%, 82%, 81%, 80% etc.).

[0300] By “conserved sequence region” is meant, a nucleotide sequence of one or more regions in a polynucleotide does not vary significantly between generations or from one biological system, subject, or organism to another biological system, subject, or organism. The polynucleotide can include both coding and non-coding DNA and RNA.

[0301] By “sense region” is meant a nucleotide sequence of a siNA molecule having complementarity to an antisense region of the siNA molecule. In addition, the sense region of a siNA molecule can comprise a nucleic acid sequence having homology with a target nucleic acid sequence. In one embodiment, the sense region of the siNA molecule is referred to as the sense strand or passenger strand

[0302] By “antisense region” is meant a nucleotide sequence of a siNA molecule having complementarity to a target nucleic acid sequence. In addition, the antisense region of a siNA molecule can optionally comprise a nucleic acid sequence having complementarity to a sense region of the siNA molecule. In one embodiment, the antisense region of the siNA molecule is referred to as the antisense strand or guide strand.

[0303] By “target nucleic acid” or “target polynucleotide” is meant any nucleic acid sequence whose expression or activity is to be modulated. The target nucleic acid can be DNA or RNA. In one embodiment, a target nucleic acid of the invention is interleukin and/or interleukin receptor RNA or DNA.

[0304] By “complementarity” is meant that a nucleic acid can form hydrogen bond(s) with another nucleic acid sequence by either traditional Watson-Crick or other non-traditional types as described herein. In one embodiment, a double stranded nucleic acid molecule of the invention, such as an siNA molecule, wherein each strand is between 15 and 30 nucleotides in length, comprises between about 10% and about 100% (e.g., about 10%, 20%, 30%, 40%, 50%, 60%, 70%, 80%, 90%, or 100%) complementarity between the two strands of the double stranded nucleic acid molecule. In another embodiment, a double stranded nucleic acid molecule of the invention, such as an siNA molecule, where one strand is the sense strand and the other stand is the antisense strand, wherein each strand is between 15 and 30 nucleotides in length, comprises between at least about 10% and about 100% (e.g., at least about 10%, 20%, 30%, 40%, 50%, 60%, 70%, 80%, 90%, or 100%) complementarity between the nucleotide sequence in the antisense strand of the double stranded nucleic acid molecule and the nucleotide sequence of its corresponding target nucleic acid molecule, such as a target RNA or target mRNA or viral RNA. In one embodiment, a double stranded nucleic acid molecule of the invention, such as an siNA molecule, where one strand comprises nucleotide sequence that is referred to as the sense region and the other strand comprises a nucleotide sequence that is referred to as the antisense region, wherein each strand is between 15 and 30 nucleotides in length, comprises between about 10% and about 100% (e.g., about 10%, 20%, 30%, 40%, 50%, 60%, 70%, 80%, 90%, or 100%) complementarity between the sense region and the antisense region of the double stranded nucleic acid molecule. In reference to the nucleic molecules of the present invention, the binding free energy for a nucleic acid molecule with its complementary sequence is sufficient to allow the relevant function of the nucleic acid to proceed, e.g., RNAi activity. Determination of binding free energies for nucleic acid molecules is well known in the art (see, e.g., Turner et al., 1987, CSH Symp. Quant. Biol. LII pp. 123-133; Frier et al., 1986, Proc. Nat. Acad. Sci. USA 83:9373-9377; Turner et al., 1987, J. Am. Chem. Soc. 109:3783-3785). A percent complementarity indicates the percentage of contiguous residues in a nucleic acid molecule that can form hydrogen bonds (e.g., Watson-Crick base pairing) with a second nucleic acid sequence (e.g., 5, 6, 7, 8, 9, or 10 nucleotides out of a total of 10 nucleotides in the first oligonucleotide being based paired to a second nucleic acid sequence having 10 nucleotides represents 50%, 60%, 70%, 80%, 90%, and 100% complementary respectively). In one embodiment, a siNA molecule of the invention has perfect complementarity between the sense strand or sense region and the antisense strand or antisense region of the siNA molecule. In one embodiment, a siNA molecule of the invention is perfectly complementary to a corresponding target nucleic acid molecule. “Perfectly complementary” means that all the contiguous residues of a nucleic acid sequence will hydrogen bond with the same number of contiguous residues in a second nucleic acid sequence. In one embodiment, a siNA molecule of the invention comprises about 15 to about 30 or more (e.g., about 15, 16, 17, 18, 19, 20, 21, 22, 23, 24, 25, 26, 27, 28, 29, or 30 or more) nucleotides that are complementary to one or more target nucleic acid molecules or a portion thereof. In one embodiment, a siNA molecule of the invention has partial complementarity (i.e., less than 100% complementarity) between the sense strand or sense region and the antisense strand or antisense region of the siNA molecule or between the antisense strand or antisense region of the siNA molecule and a corresponding target nucleic acid molecule. For example, partial complementarity can include various mismatches or non-based paired nucleotides (e.g., 1, 2, 3, 4, 5 or more mismatches or non-based paired nucleotides) within the siNA structure which can result in bulges, loops, or overhangs that result between the between the sense strand or sense region and the antisense strand or antisense region of the siNA molecule or between the antisense strand or antisense region of the siNA molecule and a corresponding target nucleic acid molecule.

[0305] In one embodiment, a double stranded nucleic acid molecule of the invention, such as siNA molecule, has perfect complementarity between the sense strand or sense region and the antisense strand or antisense region of the nucleic acid molecule. In one embodiment, double stranded nucleic acid molecule of the invention, such as siNA molecule, is perfectly complementary to a corresponding target nucleic acid molecule.

[0306] In one embodiment, double stranded nucleic acid molecule of the invention, such as siNA molecule, has partial complementarity (i.e., less than 100% complementarity) between the sense strand or sense region and the antisense strand or antisense region of the double stranded nucleic acid molecule or between the antisense strand or antisense region of the nucleic acid molecule and a corresponding target nucleic acid molecule. For example, partial complementarity can include various mismatches or non-base paired nucleotides (e.g., 1, 2, 3, 4, 5 or more mismatches or non-based paired nucleotides, such as nucleotide bulges) within the double stranded nucleic acid molecule, structure which can result in bulges, loops, or overhangs that result between the sense strand or sense region and the antisense strand or antisense region of the double stranded nucleic acid molecule or between the antisense strand or antisense region of the double stranded nucleic acid molecule and a corresponding target nucleic acid molecule.

[0307] In one embodiment, double stranded nucleic acid molecule of the invention is a microRNA (miRNA). By “mircoRNA” or “miRNA” is meant, a small double stranded RNA that regulates the expression of target messenger RNAs either by mRNA cleavage; translational repression/inhibition or heterochromatic silencing (see for example Ambros, 2004, Nature, 431, 350-355; Bartel, 2004, Cell, 116, 281-297; Cullen, 2004, Virus Research., 102, 3-9; He et al., 2004, Nat. Rev. Genet., 5, 522-531; and Ying et al., 2004, Gene, 342, 25-28). In one embodiment, the microRNA of the invention, has partial complementarity (i.e., less than 100% complementarity) between the sense strand or sense region and the antisense strand or antisense region of the miRNA molecule or between the antisense strand or antisense region of the miRNA and a corresponding target nucleic acid molecule. For example, partial complementarity can include various mismatches or non-base paired nucleotides (e.g., 1, 2, 3, 4, 5 or more mismatches or non-based paired nucleotides, such as nucleotide bulges) within the double stranded nucleic acid molecule, structure which can result in bulges, loops, or overhangs that result between the sense strand or sense region and the antisense strand or antisense region of the miRNA or between the antisense strand or antisense region of the miRNA and a corresponding target nucleic acid molecule.

[0308] In one embodiment, siNA molecules of the invention that down regulate or reduce interleukin and/or interleukin receptor gene expression are used for preventing or treating cancer, inflammatory, respiratory, autoimmune, cardiovascular, neurological, and/or proliferative diseases, disorders, conditions, or traits in a subject or organism as described herein or otherwise known in the art.

[0309] In one embodiment, the siNA molecules of the invention are used to treat cancer, inflammatory, respiratory, autoimmune, cardiovascular, neurological, and/or proliferative diseases, disorders, and/or conditions in a subject or organism.

[0310] By “proliferative disease” or “cancer” as used herein is meant, any disease, condition, trait, genotype or phenotype characterized by unregulated cell growth or replication as is known in the art; including leukemias, for example, acute myelogenous leukemia (AML), chronic myelogenous leukemia (CML), acute lymphocytic leukemia (ALL), and chronic lymphocytic leukemia, AIDS related cancers such as Kaposi's sarcoma; breast cancers; bone cancers such as Osteosarcoma, Chondrosarcomas, Ewing's sarcoma, Fibrosarcomas, Giant cell tumors, Adamantinomas, and Chordomas; Brain cancers such as Meningiomas, Glioblastomas, Lower-Grade Astrocytomas, Oligodendrocytomas, Pituitary Tumors, Schwannomas, and Metastatic brain cancers; cancers of the head and neck including various lymphomas such as mantle cell lymphoma, non-Hodgkins lymphoma, adenoma, squamous cell carcinoma, laryngeal carcinoma, gallbladder and bile duct cancers, cancers of the retina such as retinoblastoma, cancers of the esophagus, gastric cancers, multiple myeloma, ovarian cancer, uterine cancer, thyroid cancer, testicular cancer, endometrial cancer, melanoma, colorectal cancer, lung cancer, bladder cancer, prostate cancer, lung cancer (including non-small cell lung carcinoma), pancreatic cancer, sarcomas, Wilms' tumor, cervical cancer, head and neck cancer, skin cancers, nasopharyngeal carcinoma, liposarcoma, epithelial carcinoma, renal cell carcinoma, gallbladder adeno carcinoma, parotid adenocarcinoma, endometrial sarcoma, multidrug resistant cancers; and proliferative diseases and conditions, such as neovascularization associated with tumor angiogenesis, macular degeneration (e.g., wet/dry AMD), corneal neovascularization, diabetic retinopathy, neovascular glaucoma, myopic degeneration and other proliferative diseases and conditions such as restenosis and polycystic kidney disease, and any other cancer or proliferative disease, condition, trait, genotype or phenotype that can respond to the modulation of disease related gene expression in a cell or tissue, alone or in combination with other therapies.

[0311] By “inflammatory disease” or “inflammatory condition” as used herein is meant any disease, condition, trait, genotype or phenotype characterized by an inflammatory or allergic process as is known in the art, such as inflammation, acute inflammation, chronic inflammation, respiratory disease, atherosclerosis, restenosis, asthma, allergic rhinitis, atopic dermatitis, septic shock, rheumatoid arthritis, inflammatory bowl disease, inflammatory pelvic disease, pain, ocular inflammatory disease, celiac disease, Leigh Syndrome, Glycerol Kinase Deficiency, Familial eosinophilia (FE), autosomal recessive spastic ataxia, laryngeal inflammatory disease; Tuberculosis, Chronic cholecystitis, Bronchiectasis, Silicosis and other pneumoconiosis, and any other inflammatory disease, condition, trait, genotype or phenotype that can respond to the modulation of disease related gene expression in a cell or tissue, alone or in combination with other therapies.

[0312] By “autoimmune disease” or “autoimmune condition” as used herein is meant, any disease, condition, trait, genotype or phenotype characterized by autoimmunity as is known in the art, such as multiple sclerosis, diabetes mellitus, lupus, celiac disease, Crohn's disease, ulcerative colitis, Guillain-Barre syndrome, scleroderms, Goodpasture's syndrome, Wegener's granulomatosis, autoimmune epilepsy, Rasmussen's encephalitis, Primary biliary sclerosis, Sclerosing cholangitis, Autoimmune hepatitis, Addison's disease, Hashimoto's thyroiditis, Fibromyalgia, Menier's syndrome; transplantation rejection (e.g., prevention of allograft rejection) pernicious anemia, rheumatoid arthritis, systemic lupus erythematosus, dermatomyositis, Sjogren's syndrome, lupus erythematosus, multiple sclerosis, myasthenia gravis, Reiter's syndrome, Grave's disease, and any other autoimmune disease, condition, trait, genotype or phenotype that can respond to the modulation of disease related gene expression in a cell or tissue, alone or in combination with other therapies.

[0313] By “neurologic disease” or “neurological disease” is meant any disease, disorder, or condition affecting the central or peripheral nervous system, including ADHD, AIDS-Neurological Complications, Absence of the Septum Pellucidum, Acquired Epileptiform Aphasia, Acute Disseminated Encephalomyelitis, Adrenoleukodystrophy, Agenesis of the Corpus Callosum, Agnosia, Aicardi Syndrome, Alexander Disease, Alpers' Disease, Alternating Hemiplegia, Alzheimer's Disease, Amyotrophic Lateral Sclerosis, Anencephaly, Aneurysm, Angelman Syndrome, Angiomatosis, Anoxia, Aphasia, Apraxia, Arachnoid Cysts, Arachnoiditis, Arnold-Chiari Malformation, Arteriovenous Malformation, Aspartame, Asperger Syndrome, Ataxia Telangiectasia, Ataxia, Attention Deficit-Hyperactivity Disorder, Autism, Autonomic Dysfunction, Back Pain, Barth Syndrome, Batten Disease, Behcet's Disease, Bell's Palsy, Benign Essential Blepharospasm, Benign Focal Amyotrophy, Benign Intracranial Hypertension, Bernhardt-Roth Syndrome, Binswanger's Disease, Blepharospasm, Bloch-Sulzberger Syndrome, Brachial Plexus Birth Injuries, Brachial Plexus Injuries, Bradbury-Eggleston Syndrome, Brain Aneurysm, Brain Injury, Brain and Spinal Tumors, Brown-Sequard Syndrome, Bulbospinal Muscular Atrophy, Canavan Disease, Carpal Tunnel Syndrome, Causalgia, Cavernomas, Cavernous Angioma, Cavernous Malformation, Central Cervical Cord Syndrome, Central Cord Syndrome, Central Pain Syndrome, Cephalic Disorders, Cerebellar Degeneration, Cerebellar Hypoplasia, Cerebral Aneurysm, Cerebral Arteriosclerosis, Cerebral Atrophy, Cerebral Beriberi, Cerebral Gigantism, Cerebral Hypoxia, Cerebral Palsy, Cerebro-Oculo-Facio-Skeletal Syndrome, Charcot-Marie-Tooth Disorder, Chiari Malformation, Chorea, Choreoacanthocytosis, Chronic Inflammatory Demyelinating Polyneuropathy (CIDP), Chronic Orthostatic Intolerance, Chronic Pain, Cockayne Syndrome Type II, Coffin Lowry Syndrome, Coma, including Persistent Vegetative State, Complex Regional Pain Syndrome, Congenital Facial Diplegia, Congenital Myasthenia, Congenital Myopathy, Congenital Vascular Cavernous Malformations, Corticobasal Degeneration, Cranial Arteritis, Craniosynostosis, Creutzfeldt-Jakob Disease, Cumulative Trauma Disorders, Cushing's Syndrome, Cytomegalic Inclusion Body Disease (CIBD), Cytomegalovirus Infection, Dancing Eyes-Dancing Feet Syndrome, Dandy-Walker Syndrome, Dawson Disease, De Morsier's Syndrome, Dejerine-Klumpke Palsy, Dementia—Multi-Infarct, Dementia—Subcortical, Dementia With Lewy Bodies, Dermatomyositis, Developmental Dyspraxia, Devic's Syndrome, Diabetic Neuropathy, Diffuse Sclerosis, Dravet's Syndrome, Dysautonomia, Dysgraphia, Dyslexia, Dysphagia, Dyspraxia, Dystonias, Early Infantile Epileptic Encephalopathy, Empty Sella Syndrome, Encephalitis Lethargica, Encephalitis and Meningitis, Encephaloceles, Encephalopathy, Encephalotrigeminal Angiomatosis, Epilepsy, Erb's Palsy, Erb-Duchenne and Dejerine-Klumpke Palsies, Fabry's Disease, Fahr's Syndrome, Fainting, Familial Dysautonomia, Familial Hemangioma, Familial Idiopathic Basal Ganglia Calcification, Familial Spastic Paralysis, Febrile Seizures (e.g., GEFS and GEFS plus), Fisher Syndrome, Floppy Infant Syndrome, Friedreich's Ataxia, Gaucher's Disease, Gerstmann's Syndrome, Gerstmann-Straussler-Scheinker Disease, Giant Cell Arteritis, Giant Cell Inclusion Disease, Globoid Cell Leukodystrophy, Glossopharyngeal Neuralgia, Guillain-Barre Syndrome, HTLV-1 Associated Myelopathy, Hallervorden-Spatz Disease, Head Injury, Headache, Hemicrania Continua, Hemifacial Spasm, Hemiplegia Alterans, Hereditary Neuropathies, Hereditary Spastic Paraplegia, Heredopathia Atactica Polyneuritiformis, Herpes Zoster Oticus, Herpes Zoster, Hirayama Syndrome, Holoprosencephaly, Huntington's Disease, Hydranencephaly, Hydrocephalus—Normal Pressure, Hydrocephalus, Hydromyelia, Hypercortisolism, Hypersomnia, Hypertonia, Hypotonia, Hypoxia, Immune-Mediated Encephalomyelitis, Inclusion Body Myositis, Incontinentia Pigmenti, Infantile Hypotonia, Infantile Phytanic Acid Storage Disease, Infantile Refsum Disease, Infantile Spasms, Inflammatory Myopathy, Intestinal Lipodystrophy, Intracranial Cysts, Intracranial Hypertension, Isaac's Syndrome, Joubert Syndrome, Kearns-Sayre Syndrome, Kennedy's Disease, Kinsbourne syndrome, Keine-Levin syndrome, Klippel Feil Syndrome, Klippel-Trenaunay Syndrome (KTS), Klüver-Bucy Syndrome, Korsakoffs Amnesic Syndrome, Krabbe Disease, Kugelberg-Welander Disease, Kuru, Lambert-Eaton Myasthenic Syndrome, Landau-Kleffner Syndrome, Lateral Femoral Cutaneous Nerve Entrapment, Lateral Medullary Syndrome, Learning Disabilities, Leigh's Disease, Lennox-Gastaut Syndrome, Lesch-Nyhan Syndrome, Leukodystrophy, Levine-Critchley Syndrome, Lewy Body Dementia, Lissencephaly, Locked-In Syndrome, Lou Gehrig's Disease, Lupus—Neurological Sequelae, Lyme Disease—Neurological Complications, Machado-Joseph Disease, Macrencephaly, Megalencephaly, Melkersson-Rosenthal Syndrome, Meningitis, Menkes Disease, Meralgia Paresthetica, Metachromatic Leukodystrophy, Microcephaly, Migraine, Miller Fisher Syndrome, Mini-Strokes, Mitochondrial Myopathies, Mobius Syndrome, Monomelic Amyotrophy, Motor Neuron Diseases, Moyamoya Disease, Mucolipidoses, Mucopolysaccharidoses, Multi-Infarct Dementia, Multifocal Motor Neuropathy, Multiple Sclerosis, Multiple System Atrophy with Orthostatic. Hypotension, Multiple System Atrophy, Muscular Dystrophy, Myasthenia—Congenital, Myasthenia Gravis, Myelinoclastic Diffuse Sclerosis, Myoclonic Encephalopathy of Infants, Myoclonus, Myopathy—Congenital, Myopathy—Thyrotoxic, Myopathy, Myotonia Congenita, Myotonia, Narcolepsy, Neuroacanthocytosis, Neurodegeneration with Brain Iron Accumulation, Neurofibromatosis, Neuroleptic Malignant Syndrome, Neurological Complications of AIDS, Neurological Manifestations of Pompe Disease, Neuromyelitis Optica, Neuromyotonia, Neuronal Ceroid Lipofuscinosis, Neuronal Migration Disorders, Neuropathy—Hereditary, Neurosarcoidosis, Neurotoxicity, Nevus Cavernosus, Niemann-Pick Disease, O'Sullivan-McLeod Syndrome, Occipital Neuralgia, Occult Spinal Dysraphism Sequence, Ohtahara Syndrome, Olivopontocerebellar Atrophy, Opsoclonus Myoclonus, Orthostatic Hypotension, Overuse Syndrome, Pain—Chronic, Paraneoplastic Syndromes, Paresthesia, Parkinson's Disease, Parmyotonia Congenita, Paroxysmal Choreoathetosis, Paroxysmal Hemicrania, Parry-Romberg, Pelizaeus-Merzbacher Disease, Pena Shokeir II Syndrome, Perineural Cysts, Periodic Paralyses, Peripheral Neuropathy, Periventricular Leukomalacia, Persistent Vegetative State, Pervasive Developmental Disorders, Phytanic Acid Storage Disease, Pick's Disease, Piriformis Syndrome, Pituitary Tumors, Polymyositis, Pompe Disease, Porencephaly, Post-Polio Syndrome, Postherpetic Neuralgia, Postinfectious Encephalomyelitis, Postural Hypotension, Postural Orthostatic Tachycardia Syndrome, Postural Tachycardia Syndrome, Primary Lateral Sclerosis, Prion Diseases, Progressive Hemifacial Atrophy, Progressive Locomotor Ataxia, Progressive Multifocal Leukoencephalopathy, Progressive Sclerosing Poliodystrophy, Progressive Supranuclear Palsy, Pseudotumor Cerebri, Pyridoxine Dependent and Pyridoxine Responsive Siezure Disorders, Ramsay Hunt Syndrome Type I, Ramsay Hunt Syndrome Type II, Rasmussen's Encephalitis and other autoimmune epilepsies, Reflex Sympathetic Dystrophy Syndrome, Refsum Disease—Infantile, Refsum Disease, Repetitive Motion Disorders, Repetitive Stress Injuries, Restless Legs Syndrome, Retrovirus-Associated Myelopathy, Rett Syndrome, Reye's Syndrome, Riley-Day Syndrome, SUNCT Headache, Sacral Nerve Root Cysts, Saint Vitus Dance, Salivary Gland Disease, Sandhoff Disease, Schilder's Disease, Schizencephaly, Seizure Disorders, Septo-Optic Dysplasia, Severe Myoclonic Epilepsy of Infancy (SMEI), Shaken Baby Syndrome, Shingles, Shy-Drager Syndrome, Sjogren's Syndrome, Sleep Apnea, Sleeping Sickness, Soto's Syndrome, Spasticity, Spina Bifida, Spinal Cord Infarction, Spinal Cord Injury, Spinal Cord Tumors, Spinal Muscular Atrophy, Spinocerebellar Atrophy, Steele-Richardson-Olszewski Syndrome, Stiff-Person Syndrome, Striatonigral Degeneration, Stroke, Sturge-Weber Syndrome, Subacute Sclerosing Panencephalitis, Subcortical Arteriosclerotic Encephalopathy, Swallowing Disorders, Sydenham Chorea, Syncope, Syphilitic Spinal Sclerosis, Syringohydromyelia, Syringomyelia, Systemic Lupus Erythematosus, Tabes Dorsalis, Tardive Dyskinesia, Tarlov Cysts, Tay-Sachs Disease, Temporal Arteritis, Tethered Spinal Cord Syndrome, Thomsen Disease, Thoracic Outlet Syndrome, Thyrotoxic Myopathy, Tic Douloureux, Todd's Paralysis, Tourette Syndrome, Transient Ischemic Aftack, Transmissible Spongiform Encephalopathies, Transverse Myelitis, Traumatic Brain Injury, Tremor, Trigeminal Neuralgia, Tropical Spastic Paraparesis, Tuberous Sclerosis, Vascular Erectile Tumor, Vasculitis including Temporal Arteritis, Von Economo's Disease, Von Hippel-Lindau disease (VHL), Von Recklinghausen's Disease, Wallenberg's Syndrome, Werdnig-Hoffman Disease, Wernicke-Korsakoff Syndrome, West Syndrome, Whipple's Disease, Williams Syndrome, Wilson's Disease, X-Linked Spinal and Bulbar Muscular Atrophy, and Zellweger Syndrome.

[0314] By “respiratory disease” is meant, any disease or condition affecting the respiratory tract, such as asthma, chronic obstructive pulmonary disease or “COPD”, bronchiectasis, allergic rhinitis, sinusitis, pulmonary vasoconstriction, inflammation, allergies, impeded respiration, respiratory distress syndrome, cystic fibrosis, pulmonary hypertension, pulmonary vasoconstriction, emphysema, Hantavirus pulmonary syndrome (HPS), Loeffler's syndrome, Goodpasture's syndrome, Pleurisy, pneumonitis, pulmonary edema, pulmonary fibrosis, Sarcoidosis, complications associated with respiratory syncitial virus infection, and any other respiratory disease, condition, trait, genotype or phenotype that can respond to the modulation of disease related gene expression in a cell or tissue, alone or in combination with other therapies. Respiratory diseases and conditions are commonly associated with airway hyperresponsiveness mediated by cytokines, including interleukins described herein.

[0315] By “airway hyperresponsiveness” as used herein is meant, any disfunction of the respiratory tract that involves increased sensitivity to an airway constrictive or inflammatory agonist, such as environmental allergens. Airway hyperresponsiveness is a characteristic feature of asthma and other respiratory diseases and generally consists of an increased sensitivity of the airways to an inhaled constrictor agonist, a steeper slope of the dose-response curve, and a greater maximal response to the agonist. Measurements of airway responsiveness are useful in making a diagnosis of asthma, particularly in patients who have symptoms that are consistent with asthma and who have no evidence of airflow obstruction. Certain inhaled stimuli, such as environmental allergens, can increase airway inflammation and enhance airway hyperresponsiveness. These changes in airway hyperresponsiveness are of much smaller magnitude than those seen when asthmatic patients with persistent airway hyperresponsiveness are compared to healthy subjects. They are, however, similar to changes occurring in asthmatic patients that are associated with worsening asthma control. The mechanisms of the transient allergen-induced airway hyperresponsiveness are not likely to fully explain the underlying mechanisms of the persistent airway hyperresponsiveness in asthmatic patients (see for example O-Byrne et al., 2003, Chest, 123, 411S-416S).

[0316] By “cardiovascular disease” is meant and disease or condition affecting the heart and vasculature, including but not limited to, coronary heart disease (CHD), cerebrovascular disease (CVD), aortic stenosis, peripheral vascular disease, atherosclerosis, arteriosclerosis, myocardial infarction (heart attack), cerebrovascular diseases (stroke), transient ischaemic attacks (TIA), angina (stable and unstable), atrial fibrillation, arrhythmia, vavular disease, and/or congestive heart failure.

[0317] By “dermatological disease” means any disease or condition of the skin, dermis, or any substructure therein such as hair, follicle, etc. Dermatological diseases, disorders, conditions, and traits can include psoriasis, ectopic dermatitis, skin cancers such as melanoma and basal cell carcinoma, hair loss, hair removal, alterations in pigmentation, and any other disease, condition, or trait associated with the skin, dermis, or structures therein.

[0318] In one embodiment of the present invention, each sequence of a siNA molecule of the invention is independently about 15 to about 30 nucleotides in length, in specific embodiments about 15, 16, 17, 18, 19, 20, 21, 22, 23, 24, 25, 26, 27, 28, 29, or 30 nucleotides in length. In another embodiment, the siNA duplexes of the invention independently comprise about 15 to about 30 base pairs (e.g., about 15, 16, 17, 18, 19, 20, 21, 22, 23, 24, 25, 26, 27, 28, 29, or 30). In another embodiment, one or more strands of the siNA molecule of the invention independently comprises about 15 to about 30 nucleotides (e.g., about 15, 16, 17, 18, 19, 20, 21, 22, 23, 24, 25, 26, 27, 28, 29, or 30) that are complementary to a target nucleic acid molecule. In yet another embodiment, siNA molecules of the invention comprising hairpin or circular structures are about 35 to about 55 (e.g., about 35, 40, 45, 50 or 55) nucleotides in length, or about 38 to about 44 (e.g., about 38, 39, 40, 41, 42, 43, or 44) nucleotides in length and comprising about 15 to about 25 (e.g., about 15, 16, 17, 18, 19, 20, 21, 22, 23, 24, or 25) base pairs. Exemplary siNA molecules of the invention are shown in Table II. Exemplary synthetic siNA molecules of the invention are shown in Table III and/or FIGS. 4-5.

[0319] As used herein “cell” is used in its usual biological sense, and does not refer to an entire multicellular organism, e.g., specifically does not refer to a human. The cell can be present in an organism, e.g., birds, plants and mammals such as humans, cows, sheep, apes, monkeys, swine, dogs, and cats. The cell can be prokaryotic (e.g., bacterial cell) or eukaryotic (e.g., mammalian or plant cell). The cell can be of somatic or germ line origin, totipotent or pluripotent, dividing or non-dividing. The cell can also be derived from or can comprise a gamete or embryo, a stem cell, or a fully differentiated cell.

[0320] The siNA molecules of the invention are added directly, or can be complexed with cationic lipids, packaged within liposomes, or otherwise delivered to target cells or tissues. The nucleic acid or nucleic acid complexes can be locally administered to relevant tissues ex vivo, or in vivo through local delivery to the lung, direct dermal application, transdermal application, or injection with or without their incorporation in biopolymers. In particular embodiments, the nucleic acid molecules of the invention comprise sequences shown in Tables II-III and/or FIGS. 4-5. Examples of such nucleic acid molecules consist essentially of sequences defined in these tables and figures. Furthermore, the chemically modified constructs described in Table IV can be applied to any siNA sequence of the invention.

[0321] In another aspect, the invention provides mammalian cells containing one or more siNA molecules of this invention. The one or more siNA molecules can independently be targeted to the same or different sites.

[0322] By “RNA” is meant a molecule comprising at least one ribonucleotide residue. By “ribonucleotide” is meant a nucleotide with a hydroxyl group at the 2′ position of a β-D-ribofuranose moiety. The terms include double-stranded RNA, single-stranded RNA, isolated RNA such as partially purified RNA, essentially pure RNA, synthetic RNA, recombinantly produced RNA, as well as altered RNA that differs from naturally occurring RNA by the addition, deletion, substitution and/or alteration of one or more nucleotides. Such alterations can include addition of non-nucleotide material, such as to the end(s) of the siNA or internally, for example at one or more nucleotides of the RNA. Nucleotides in the RNA molecules of the instant invention can also comprise non-standard nucleotides, such as non-naturally occurring nucleotides or chemically synthesized nucleotides or deoxynucleotides. These altered RNAs can be referred to as analogs or analogs of naturally-occurring RNA.

[0323] By “subject” is meant an organism, which is a donor or recipient of explanted cells or the cells themselves. “Subject” also refers to an organism to which the nucleic acid molecules of the invention can be administered. A subject can be a mammal or mammalian cells, including a human or human cells.

[0324] By “chemical modification” as used herein is meant any modification of chemical structure of the nucleotides that differs from nucleotides of native siRNA or RNA. The term “chemical modification” encompasses the addition, substitution, or modification of native siRNA or RNA nucleosides and nucleotides with modified nucleosides and modified nucleotides as described herein or as is otherwise known in the art. Non-limiting examples of such chemical modifications include without limitation phosphorothioate internucleotide linkages, 2′-deoxyribonucleotides, 2′-O-methyl ribonucleotides, 2′-deoxy-2′-fluoro ribonucleotides, 4′-thio ribonucleotides, 2′-O-trifluoromethyl nucleotides, 2′-O-ethyl-trifluoromethoxy nucleotides, 2′-O-difluoromethoxy-ethoxy nucleotides (see for example U.S. Ser. No. 10/981,966 filed Nov. 5, 2004, incorporated by reference herein), “universal base” nucleotides, “acyclic” nucleotides, 5-C-methyl nucleotides, terminal glyceryl and/or inverted deoxy abasic residue incorporation, or a modification having any of Formulae I-VII herein.

[0325] The term “phosphorothioate” as used herein refers to an internucleotide linkage having Formula I, wherein Z and/or W comprise a sulfur atom. Hence, the term phosphorothioate refers to both phosphorothioate and phosphorodithioate internucleotide linkages.

[0326] The term “phosphonoacetate” as used herein refers to an internucleotide linkage having Formula I, wherein Z and/or W comprise an acetyl or protected acetyl group.

[0327] The term “thiophosphonoacetate” as used herein refers to an internucleotide linkage having Formula I, wherein Z comprises an acetyl or protected acetyl group and W comprises a sulfur atom or alternately W comprises an acetyl or protected acetyl group and Z comprises a sulfur atom.

[0328] The term “universal base” as used herein refers to nucleotide base analogs that form base pairs with each of the natural DNA/RNA bases with little discrimination between them. Non-limiting examples of universal bases include C-phenyl, C-naphthyl and other aromatic derivatives, inosine, azole carboxamides, and nitroazole derivatives such as 3-nitropyrrole, 4-nitroindole, 5-nitroindole, and 6-nitroindole as known in the art (see for example Loakes, 2001, Nucleic Acids Research, 29, 2437-2447).

[0329] The term “acyclic nucleotide” as used herein refers to any nucleotide having an acyclic ribose sugar, for example where any of the ribose carbons (C1, C2, C3, C4, or C5), are independently or in combination absent from the nucleotide.

[0330] The nucleic acid molecules of the instant invention, individually, or in combination or in conjunction with other drugs, can be used to for preventing or treating cancer, inflammatory, respiratory, autoimmune, cardiovascular, neurological, and/or proliferative diseases, conditions, disorders and traits described herein or otherwise known in the art in a subject or organism.

[0331] In one embodiment, a siNA molecule or composition of the invention is used to treat asthma, COPD, allergic rhinitis, emphysema, or any other respiratory disease herein.

[0332] In one embodiment, the siNA molecules of the invention can be administered to a subject or can be administered to other appropriate cells evident to those skilled in the art, individually or in combination with one or more drugs under conditions suitable for the treatment.

[0333] In a further embodiment, the siNA molecules can be used in combination with other known treatments to prevent or treat cancer, inflammatory, respiratory, autoimmune, cardiovascular, neurological, and/or proliferative diseases, conditions, disorders and traits described herein in a subject or organism. For example, the described molecules could be used in combination with one or more known compounds, treatments, or procedures to prevent or treat cancer, inflammatory, respiratory, autoimmune, cardiovascular, neurological, and/or proliferative diseases, conditions, disorders and traits described herein in a subject or organism as are known in the art.

[0334] In one embodiment, the invention features an expression vector comprising a nucleic acid sequence encoding at least one siNA molecule of the invention, in a manner which allows expression of the siNA molecule. For example, the vector can contain sequence(s) encoding both strands of a siNA molecule comprising a duplex. The vector can also contain sequence(s) encoding a single nucleic acid molecule that is self-complementary and thus forms a siNA molecule. Non-limiting examples of such expression vectors are described in Paul et al., 2002, Nature Biotechnology, 19, 505; Miyagishi and Taira, 2002, Nature Biotechnology, 19, 497; Lee et al., 2002, Nature Biotechnology, 19, 500; and Novina et al., 2002, Nature Medicine, advance online publication doi: 10.1038/nm725.

[0335] In another embodiment, the invention features a mammalian cell, for example, a human cell, including an expression vector of the invention.

[0336] In yet another embodiment, the expression vector of the invention comprises a sequence for a siNA molecule having complementarity to a RNA molecule referred to by a GenBank Accession numbers, for example GenBank Accession Nos. shown in Table I, U.S. Ser. No. 10/923,536 and U.S. Ser. No. 10/923,536, incorporated by reference herein.

[0337] In one embodiment, an expression vector of the invention comprises a nucleic acid sequence encoding two or more siNA molecules, which can be the same or different.

[0338] In another aspect of the invention, siNA molecules that interact with target RNA molecules and down-regulate gene encoding target RNA molecules (for example target RNA molecules referred to by GenBank Accession numbers herein) are expressed from transcription units inserted into DNA or RNA vectors. The recombinant vectors can be DNA plasmids or viral vectors. siNA expressing viral vectors can be constructed based on, but not limited to, adeno-associated virus, retrovirus, adenovirus, or alphavirus. The recombinant vectors capable of expressing the siNA molecules can be delivered as described herein, and persist in target cells. Alternatively, viral vectors can be used that provide for transient expression of siNA molecules. Such vectors can be repeatedly administered as necessary. Once expressed, the siNA molecules bind and down-regulate gene function or expression via RNA interference (RNAi). Delivery of siNA expressing vectors can be systemic, such as by intravenous or intramuscular administration, by administration to target cells ex-planted from a subject followed by reintroduction into the subject, or by any other means that would allow for introduction into the desired target cell.

[0339] By “vectors” is meant any nucleic acid- and/or viral-based technique used to deliver a desired nucleic acid.

[0340] Other features and advantages of the invention will be apparent from the following description of the preferred embodiments thereof, and from the claims.

### BRIEF DESCRIPTION OF THE DRAWINGS

[0341] FIG. 1 shows a non-limiting example of a scheme for the synthesis of siNA molecules. The complementary siNA sequence strands, strand 1 and strand 2, are synthesized in tandem and are connected by a cleavable linkage, such as a nucleotide succinate or abasic succinate, which can be the same or different from the cleavable linker used for solid phase synthesis on a solid support. The synthesis can be either solid phase or solution phase, in the example shown, the synthesis is a solid phase synthesis. The synthesis is performed such that a protecting group, such as a dimethoxytrityl group, remains intact on the terminal nucleotide of the tandem oligonucleotide. Upon cleavage and deprotection of the oligonucleotide, the two siNA strands spontaneously hybridize to form a siNA duplex, which allows the purification of the duplex by utilizing the properties of the terminal protecting group, for example by applying a trityl on purification method wherein only duplexes/oligonucleotides with the terminal protecting group are isolated.

[0342] FIG. 2 shows a MALDI-TOF mass spectrum of a purified siNA duplex synthesized by a method of the invention. The two peaks shown correspond to the predicted mass of the separate siNA sequence strands. This result demonstrates that the siNA duplex generated from tandem synthesis can be purified as a single entity using a simple trityl-on purification methodology.

[0343] FIG. 3 shows a non-limiting proposed mechanistic representation of target RNA degradation involved in RNAi. Double-stranded RNA (dsRNA), which is generated by RNA-dependent RNA polymerase (RdRP) from foreign single-stranded RNA, for example viral, transposon, or other exogenous RNA, activates the DICER enzyme that in turn generates siNA duplexes. Alternately, synthetic or expressed siNA can be introduced directly into a cell by appropriate means. An active siNA complex forms which recognizes a target RNA, resulting in degradation of the target RNA by the RISC endonuclease complex or in the synthesis of additional RNA by RNA-dependent RNA polymerase (RdRP), which can activate DICER and result in additional siNA molecules, thereby amplifying the RNAi response.

[0344] FIG. 4A-F shows non-limiting examples of chemically-modified siNA constructs of the present invention. In the figure, N stands for any nucleotide (adenosine, guanosine, cytosine, uridine, or optionally thymidine, for example thymidine can be substituted in the overhanging regions designated by parenthesis (N N). Various modifications are shown for the sense and antisense strands of the siNA constructs.

[0345] FIG. 4A: The sense strand comprises 21 nucleotides wherein the two terminal 3′-nucleotides are optionally base paired and wherein all nucleotides present are ribonucleotides except for (N N) nucleotides, which can comprise ribonucleotides, deoxynucleotides, universal bases, or other chemical modifications described herein. The antisense strand comprises 21 nucleotides, optionally having a 3′-terminal glyceryl moiety wherein the two terminal 3′-nucleotides are optionally complementary to the target RNA sequence, and wherein all nucleotides present are ribonucleotides except for (N N) nucleotides, which can comprise ribonucleotides, deoxynucleotides, universal bases, or other chemical modifications described herein. A modified internucleotide linkage, such as a phosphorothioate, phosphorodithioate or other modified internucleotide linkage as described herein, shown as “s”, optionally connects the (N N) nucleotides in the antisense strand.

[0346] FIG. 4B: The sense strand comprises 21 nucleotides wherein the two terminal 3′-nucleotides are optionally base paired and wherein all pyrimidine nucleotides that may be present are 2′deoxy-2′-fluoro modified nucleotides and all purine nucleotides that may be present are 2′-O-methyl modified nucleotides except for (N N) nucleotides, which can comprise ribonucleotides, deoxynucleotides, universal bases, or other chemical modifications described herein. The antisense strand comprises 21 nucleotides, optionally having a 3′-terminal glyceryl moiety and wherein the two terminal 3′-nucleotides are optionally complementary to the target RNA sequence, and wherein all pyrimidine nucleotides that may be present are 2′-deoxy-2′-fluoro modified nucleotides and all purine nucleotides that may be present are 2′-O-methyl modified nucleotides except for (N N) nucleotides, which can comprise ribonucleotides, deoxynucleotides, universal bases, or other chemical modifications described herein. A modified internucleotide linkage, such as a phosphorothioate, phosphorodithioate or other modified internucleotide linkage as described herein, shown as “s”, optionally connects the (N N) nucleotides in the sense and antisense strand.

[0347] FIG. 4C: The sense strand comprises 21 nucleotides having 5′- and 3′-terminal cap moieties wherein the two terminal 3′-nucleotides are optionally base paired and wherein all pyrimidine nucleotides that may be present are 2′-O-methyl or 2′-deoxy-2′-fluoro modified nucleotides except for (N N) nucleotides, which can comprise ribonucleotides, deoxynucleotides, universal bases, or other chemical modifications described herein. The antisense strand comprises 21 nucleotides, optionally having a 3′-terminal glyceryl moiety and wherein the two terminal 3′-nucleotides are optionally complementary to the target RNA sequence, and wherein all pyrimidine nucleotides that may be present are 2′-deoxy-2′-fluoro modified nucleotides except for (N N) nucleotides, which can comprise ribonucleotides, deoxynucleotides, universal bases, or other chemical modifications described herein. A modified internucleotide linkage, such as a phosphorothioate, phosphorodithioate or other modified internucleotide linkage as described herein, shown as “s”, optionally connects the (N N) nucleotides in the antisense strand.

[0348] FIG. 4D: The sense strand comprises 21 nucleotides having 5′- and 3′-terminal cap moieties wherein the two terminal 3′-nucleotides are optionally base paired and wherein all pyrimidine nucleotides that may be present are 2′-deoxy-2′-fluoro modified nucleotides except for (N N) nucleotides, which can comprise ribonucleotides, deoxynucleotides, universal bases, or other chemical modifications described herein and wherein and all purine nucleotides that may be present are 2′-deoxy nucleotides. The antisense strand comprises 21 nucleotides, optionally having a 3′-terminal glyceryl moiety and wherein the two terminal 3′-nucleotides are optionally complementary to the target RNA sequence, wherein all pyrimidine nucleotides that may be present are 2′-deoxy-2′-fluoro modified nucleotides and all purine nucleotides that may be present are 2′-O-methyl modified nucleotides except for (N N) nucleotides, which can comprise ribonucleotides, deoxynucleotides, universal bases, or other chemical modifications described herein. A modified internucleotide linkage, such as a phosphorothioate, phosphorodithioate or other modified internucleotide linkage as described herein, shown as “s”, optionally connects the (N N) nucleotides in the antisense strand.

[0349] FIG. 4E: The sense strand comprises 21 nucleotides having 5′- and 3′-terminal cap moieties wherein the two terminal 3′-nucleotides are optionally base paired and wherein all pyrimidine nucleotides that may be present are 2′-deoxy-2′-fluoro modified nucleotides except for (N N) nucleotides, which can comprise ribonucleotides, deoxynucleotides, universal bases, or other chemical modifications described herein. The antisense strand comprises 21 nucleotides, optionally having a 3′-terminal glyceryl moiety and wherein the two terminal 3′-nucleotides are optionally complementary to the target RNA sequence, and wherein all pyrimidine nucleotides that may be present are 2′-deoxy-2′-fluoro modified nucleotides and all purine nucleotides that may be present are 2′-O-methyl modified nucleotides except for (N N) nucleotides, which can comprise ribonucleotides, deoxynucleotides, universal bases, or other chemical modifications described herein. A modified internucleotide linkage, such as a phosphorothioate, phosphorodithioate or other modified internucleotide linkage as described herein, shown as “s”, optionally connects the (N N) nucleotides in the antisense strand.

[0350] FIG. 4F: The sense strand comprises 21 nucleotides having 5′- and 3′-terminal cap moieties wherein the two terminal 3′-nucleotides are optionally base paired and wherein all pyrimidine nucleotides that may be present are 2′-deoxy-2′-fluoro modified nucleotides except for (N N) nucleotides, which can comprise ribonucleotides, deoxynucleotides, universal bases, or other chemical modifications described herein and wherein and all purine nucleotides that may be present are 2′-deoxy nucleotides. The antisense strand comprises 21 nucleotides, optionally having a 3′-terminal glyceryl moiety and wherein the two terminal 3′-nucleotides are optionally complementary to the target RNA sequence, and having one 3′-terminal phosphorothioate internucleotide linkage and wherein all pyrimidine nucleotides that may be present are 2′-deoxy-2′-fluoro modified nucleotides and all purine nucleotides that may be present are 2′-deoxy nucleotides except for (N N) nucleotides, which can comprise ribonucleotides, deoxynucleotides, universal bases, or other chemical modifications described herein. A modified internucleotide linkage, such as a phosphorothioate, phosphorodithioate or other modified internucleotide linkage as described herein, shown as “s”, optionally connects the (N N) nucleotides in the antisense strand. The antisense strand of constructs A-F comprise sequence complementary to any target nucleic acid sequence of the invention. Furthermore, when a glyceryl moiety (L) is present at the 3′-end of the antisense strand for any construct shown in FIG. 4 A-F, the modified internucleotide linkage is optional.

[0351] FIG. 5A-F shows non-limiting examples of specific chemically-modified siNA sequences of the invention. A-F applies the chemical modifications described in FIG. 4A-F to a IL-13R receptor siNA sequence. Such chemical modifications can be applied to any interleukin and/or interleukin receptor sequence or other target polynucleotide sequence.

[0352] FIG. 6A-B shows non-limiting examples of different siNA constructs of the invention. The examples shown in FIG. 6A (constructs 1, 2, and 3) have 19 representative base pairs; however, different embodiments of the invention include any number of base pairs described herein. Bracketed regions represent nucleotide overhangs, for example, comprising about 1, 2, 3, or 4 nucleotides in length, preferably about 2 nucleotides. Constructs 1 and 2 can be used independently for RNAi activity. Construct 2 can comprise a polynucleotide or non-nucleotide linker, which can optionally be designed as a biodegradable linker. In one embodiment, the loop structure shown in construct 2 can comprise a biodegradable linker that results in the formation of construct 1 in vivo and/or in vitro. In another example, construct 3 can be used to generate construct 2 under the same principle wherein a linker is used to generate the active siNA construct 2 in vivo and/or in vitro, which can optionally utilize another biodegradable linker to generate the active siNA construct 1 in vivo and/or in vitro. As such, the stability and/or activity of the siNA constructs can be modulated based on the design of the siNA construct for use in vivo or in vitro and/or in vitro.

[0353] The examples shown in FIG. 6B represent different variations of double stranded nucleic acid molecule of the invention, such as microRNA, that can include overhangs, bulges, loops, and stem-loops resulting from partial complementarity. Such motifs having bulges, loops, and stem-loops are generally characteristics of miRNA. The bulges, loops, and stem-loops can result from any degree of partial complementarity, such as mismatches or bulges of about 1, 2, 3, 4, 5, 6, 7, 8, 9, 10 or more nucleotides in one or both strands of the double stranded nucleic acid molecule of the invention.

[0354] FIG. 7A-C is a diagrammatic representation of a scheme utilized in generating an expression cassette to generate siNA hairpin constructs.

[0355] FIG. 7A: A DNA oligomer is synthesized with a 5′-restriction site (R1) sequence followed by a region having sequence identical (sense region of siNA) to a predetermined interleukin and/or interleukin receptor target sequence, wherein the sense region comprises, for example, about 19, 20, 21, or 22 nucleotides (N) in length, which is followed by a loop sequence of defined sequence (X), comprising, for example, about 3 to about 10 nucleotides.

[0356] FIG. 7B: The synthetic construct is then extended by DNA polymerase to generate a hairpin structure having self-complementary sequence that will result in a siNA transcript having specificity for a interleukin and/or interleukin receptor target sequence and having self-complementary sense and antisense regions.

[0357] FIG. 7C: The construct is heated (for example to about 95° C.) to linearize the sequence, thus allowing extension of a complementary second DNA strand using a primer to the 3′-restriction sequence of the first strand. The double-stranded DNA is then inserted into an appropriate vector for expression in cells. The construct can be designed such that a 3′-terminal nucleotide overhang results from the transcription, for example, by engineering restriction sites and/or utilizing a poly-U termination region as described in Paul et al., 2002, Nature Biotechnology, 29, 505-508.

[0358] FIG. 8A-C is a diagrammatic representation of a scheme utilized in generating an expression cassette to generate double-stranded siNA constructs.

[0359] FIG. 8A: A DNA oligomer is synthesized with a 5′-restriction (R1) site sequence followed by a region having sequence identical (sense region of siNA) to a predetermined interleukin and/or interleukin receptor target sequence, wherein the sense region comprises, for example, about 19, 20, 21, or 22 nucleotides (N) in length, and which is followed by a 3′-restriction site (R2) which is adjacent to a loop sequence of defined sequence (X).

[0360] FIG. 8B: The synthetic construct is then extended by DNA polymerase to generate a hairpin structure having self-complementary sequence.

[0361] FIG. 8C: The construct is processed by restriction enzymes specific to R1 and R2 to generate a double-stranded DNA which is then inserted into an appropriate vector for expression in cells. The transcription cassette is designed such that a U6 promoter region flanks each side of the dsDNA which generates the separate sense and antisense strands of the siNA. Poly T termination sequences can be added to the constructs to generate U overhangs in the resulting transcript.

[0362] FIG. 9A-E is a diagrammatic representation of a method used to determine target sites for siNA mediated RNAi within a particular target nucleic acid sequence, such as messenger RNA.

[0363] FIG. 9A: A pool of siNA oligonucleotides are synthesized wherein the antisense region of the siNA constructs has complementarity to target sites across the target nucleic acid sequence, and wherein the sense region comprises sequence complementary to the antisense region of the siNA.

[0364] FIGS. 9B&C: (FIG. 9B) The sequences are pooled and are inserted into vectors such that (FIG. 9C) transfection of a vector into cells results in the expression of the siNA.

[0365] FIG. 9D: Cells are sorted based on phenotypic change that is associated with modulation of the target nucleic acid sequence.

[0366] FIG. 9E: The siNA is isolated from the sorted cells and is sequenced to identify efficacious target sites within the target nucleic acid sequence.

[0367] FIG. 10 shows non-limiting examples of different stabilization chemistries (1-10) that can be used, for example, to stabilize the 3′-end of siNA sequences of the invention, including (1) [3-3′]-inverted deoxyribose; (2) deoxyribonucleotide; (3) [5′-3′]-3′-deoxyribonucleotide; (4) [5′-3′]-ribonucleotide; (5) [5′-3′]-3′-O-methyl ribonucleotide; (6) 3′-glyceryl; (7) [3′-5′]-3′-deoxyribonucleotide; (8) [3′-3′]-deoxyribonucleotide; (9) [5′-2′]-deoxyribonucleotide; and (10) [5-3′]-dideoxyribonucleotide. In addition to modified and unmodified backbone chemistries indicated in the figure, these chemistries can be combined with different backbone modifications as described herein, for example, backbone modifications having Formula I. In addition, the 2′-deoxy nucleotide shown 5′ to the terminal modifications shown can be another modified or unmodified nucleotide or non-nucleotide described herein, for example modifications having any of Formulae I-VII or any combination thereof.

[0368] FIG. 11 shows a non-limiting example of a strategy used to identify chemically modified siNA constructs of the invention that are nuclease resistance while preserving the ability to mediate RNAi activity. Chemical modifications are introduced into the siNA construct based on educated design parameters (e.g. introducing 2′-modifications, base modifications, backbone modifications, terminal cap modifications etc). The modified construct in tested in an appropriate system (e.g. human serum for nuclease resistance, shown, or an animal model for PK/delivery parameters). In parallel, the siNA construct is tested for RNAi activity, for example in a cell culture system such as a luciferase reporter assay). Lead siNA constructs are then identified which possess a particular characteristic while maintaining RNAi activity, and can be further modified and assayed once again. This same approach can be used to identify siNA-conjugate molecules with improved pharmacokinetic profiles, delivery, and RNAi activity.

[0369] FIG. 12 shows non-limiting examples of phosphorylated siNA molecules of the invention, including linear and duplex constructs and asymmetric derivatives thereof.

[0370] FIG. 13 shows non-limiting examples of chemically modified terminal phosphate groups of the invention.

[0371] FIG. 14A shows a non-limiting example of methodology used to design self complementary DFO constructs utilizing palindrome and/or repeat nucleic acid sequences that are identified in a target nucleic acid sequence. (i) A palindrome or repeat sequence is identified in a nucleic acid target sequence. (ii) A sequence is designed that is complementary to the target nucleic acid sequence and the palindrome sequence. (iii) An inverse repeat sequence of the non-palindrome/repeat portion of the complementary sequence is appended to the 3′-end of the complementary sequence to generate a self complementary DFO molecule comprising sequence complementary to the nucleic acid target. (iv) The DFO molecule can self-assemble to form a double stranded oligonucleotide. FIG. 14B shows a non-limiting representative example of a duplex forming oligonucleotide sequence. FIG. 14C shows a non-limiting example of the self assembly schematic of a representative duplex forming oligonucleotide sequence. FIG. 14D shows a non-limiting example of the self assembly schematic of a representative duplex forming oligonucleotide sequence followed by interaction with a target nucleic acid sequence resulting in modulation of gene expression.

[0372] FIG. 15 shows a non-limiting example of the design of self complementary DFO constructs utilizing palindrome and/or repeat nucleic acid sequences that are incorporated into the DFO constructs that have sequence complementary to any target nucleic acid sequence of interest. Incorporation of these palindrome/repeat sequences allow the design of DFO constructs that form duplexes in which each strand is capable of mediating modulation of target gene expression, for example by RNAi. First, the target sequence is identified. A complementary sequence is then generated in which nucleotide or non-nucleotide modifications (shown as X or Y) are introduced into the complementary sequence that generate an artificial palindrome (shown as XYXYXY in the Figure). An inverse repeat of the non-palindrome/repeat complementary sequence is appended to the 3′-end of the complementary sequence to generate a self complementary DFO comprising sequence complementary to the nucleic acid target. The DFO can self-assemble to form a double stranded oligonucleotide.

[0373] FIG. 16 shows non-limiting examples of multifunctional siNA molecules of the invention comprising two separate polynucleotide sequences that are each capable of mediating RNAi directed cleavage of differing target nucleic acid sequences. FIG. 16A shows a non-limiting example of a multifunctional siNA molecule having a first region that is complementary to a first target nucleic acid sequence (complementary region 1) and a second region that is complementary to a second target nucleic acid sequence (complementary region 2), wherein the first and second complementary regions are situated at the 3′-ends of each polynucleotide sequence in the multifunctional siNA. The dashed portions of each polynucleotide sequence of the multifunctional siNA construct have complementarity with regard to corresponding portions of the siNA duplex, but do not have complementarity to the target nucleic acid sequences. FIG. 16B shows a non-limiting example of a multifunctional siNA molecule having a first region that is complementary to a first target nucleic acid sequence (complementary region 1) and a second region that is complementary to a second target nucleic acid sequence (complementary region 2), wherein the first and second complementary regions are situated at the 5′-ends of each polynucleotide sequence in the multifunctional siNA. The dashed portions of each polynucleotide sequence of the multifunctional siNA construct have complementarity with regard to corresponding portions of the siNA duplex, but do not have complementarity to the target nucleic acid sequences.

[0374] FIG. 17 shows non-limiting examples of multifunctional siNA molecules of the invention comprising a single polynucleotide sequence comprising distinct regions that are each capable of mediating RNAi directed cleavage of differing target nucleic acid sequences. FIG. 17A shows a non-limiting example of a multifunctional siNA molecule having a first region that is complementary to a first target nucleic acid sequence (complementary region 1) and a second region that is complementary to a second target nucleic acid sequence (complementary region 2), wherein the second complementary region is situated at the 3′-end of the polynucleotide sequence in the multifunctional siNA. The dashed portions of each polynucleotide sequence of the multifunctional siNA construct have complementarity with regard to corresponding portions of the siNA duplex, but do not have complementarity to the target nucleic acid sequences. FIG. 17B shows a non-limiting example of a multifunctional siNA molecule having a first region that is complementary to a first target nucleic acid sequence (complementary region 1) and a second region that is complementary to a second target nucleic acid sequence (complementary region 2), wherein the first complementary region is situated at the 5′-end of the polynucleotide sequence in the multifunctional siNA. The dashed portions of each polynucleotide sequence of the multifunctional siNA construct have complementarity with regard to corresponding portions of the siNA duplex, but do not have complementarity to the target nucleic acid sequences. In one embodiment, these multifunctional siNA constructs are processed in vivo or in vitro to generate multifunctional siNA constructs as shown in FIG. 16.

[0375] FIG. 18 shows non-limiting examples of multifunctional siNA molecules of the invention comprising two separate polynucleotide sequences that are each capable of mediating RNAi directed cleavage of differing target nucleic acid sequences and wherein the multifunctional siNA construct further comprises a self complementary, palindrome, or repeat region, thus enabling shorter bifunctional siNA constructs that can mediate RNA interference against differing target nucleic acid sequences. FIG. 18A shows a non-limiting example of a multifunctional siNA molecule having a first region that is complementary to a first target nucleic acid sequence (complementary region 1) and a second region that is complementary to a second target nucleic acid sequence (complementary region 2), wherein the first and second complementary regions are situated at the 3′-ends of each polynucleotide sequence in the multifunctional siNA, and wherein the first and second complementary regions further comprise a self complementary, palindrome, or repeat region. The dashed portions of each polynucleotide sequence of the multifunctional siNA construct have complementarity with regard to corresponding portions of the siNA duplex, but do not have complementarity to the target nucleic acid sequences. FIG. 18B shows a non-limiting example of a multifunctional siNA molecule having a first region that is complementary to a first target nucleic acid sequence (complementary region 1) and a second region that is complementary to a second target nucleic acid sequence (complementary region 2), wherein the first and second complementary regions are situated at the 5′-ends of each polynucleotide sequence in the multifunctional siNA, and wherein the first and second complementary regions further comprise a self complementary, palindrome, or repeat region. The dashed portions of each polynucleotide sequence of the multifunctional siNA construct have complementarity with regard to corresponding portions of the siNA duplex, but do not have complementarity to the target nucleic acid sequences.

[0376] FIG. 19 shows non-limiting examples of multifunctional siNA molecules of the invention comprising a single polynucleotide sequence comprising distinct regions that are each capable of mediating RNAi directed cleavage of differing target nucleic acid sequences and wherein the multifunctional siNA construct further comprises a self complementary, palindrome, or repeat region, thus enabling shorter bifunctional siNA constructs that can mediate RNA interference against differing target nucleic acid sequences. FIG. 19A shows a non-limiting example of a multifunctional siNA molecule having a first region that is complementary to a first target nucleic acid sequence (complementary region 1) and a second region that is complementary to a second target nucleic acid sequence (complementary region 2), wherein the second complementary region is situated at the 3′-end of the polynucleotide sequence in the multifunctional siNA, and wherein the first and second complementary regions further comprise a self complementary, palindrome, or repeat region. The dashed portions of each polynucleotide sequence of the multifunctional siNA construct have complementarity with regard to corresponding portions of the siNA duplex, but do not have complementarity to the target nucleic acid sequences. FIG. 19B shows a non-limiting example of a multifunctional siNA molecule having a first region that is complementary to a first target nucleic acid sequence (complementary region 1) and a second region that is complementary to a second target nucleic acid sequence (complementary region 2), wherein the first complementary region is situated at the 5′-end of the polynucleotide sequence in the multifunctional siNA, and wherein the first and second complementary regions further comprise a self complementary, palindrome, or repeat region. The dashed portions of each polynucleotide sequence of the multifunctional siNA construct have complementarity with regard to corresponding portions of the siNA duplex, but do not have complementarity to the target nucleic acid sequences. In one embodiment, these multifunctional siNA constructs are processed in vivo or in vitro to generate multifunctional siNA constructs as shown in FIG. 18.

[0377] FIG. 20 shows a non-limiting example of how multifunctional siNA molecules of the invention can target two separate target nucleic acid molecules, such as separate RNA molecules encoding differing proteins, for example, a cytokine and its corresponding receptor, differing viral strains, a virus and a cellular protein involved in viral infection or replication, or differing proteins involved in a common or divergent biologic pathway that is implicated in the maintenance of progression of disease. Each strand of the multifunctional siNA construct comprises a region having complementarity to separate target nucleic acid molecules. The multifunctional siNA molecule is designed such that each strand of the siNA can be utilized by the RISC complex to initiate RNA interference mediated cleavage of its corresponding target. These design parameters can include destabilization of each end of the siNA construct (see for example Schwarz et al., 2003, Cell, 115, 199-208). Such destabilization can be accomplished for example by using guanosine-cytidine base pairs, alternate base pairs (e.g., wobbles), or destabilizing chemically modified nucleotides at terminal nucleotide positions as is known in the art.

[0378] FIG. 21 shows a non-limiting example of how multifunctional siNA molecules of the invention can target two separate target nucleic acid sequences within the same target nucleic acid molecule, such as alternate coding regions of a RNA, coding and non-coding regions of a RNA, or alternate splice variant regions of a RNA. Each strand of the multifunctional siNA construct comprises a region having complementarity to the separate regions of the target nucleic acid molecule. The multifunctional siNA molecule is designed such that each strand of the siNA can be utilized by the RISC complex to initiate RNA interference mediated cleavage of its corresponding target region. These design parameters can include destabilization of each end of the siNA construct (see for example Schwarz et al., 2003, Cell, 115, 199-208). Such destabilization can be accomplished for example by using guanosine-cytidine base pairs, alternate base pairs (e.g., wobbles), or destabilizing chemically modified nucleotides at terminal nucleotide positions as is known in the art.

[0379] FIG. 22(A-H) shows non-limiting examples of tethered multifunctional siNA constructs of the invention. In the examples shown, a linker (e.g., nucleotide or non-nucleotide linker) connects two siNA regions (e.g., two sense, two antisense, or alternately a sense and an antisense region together. Separate sense (or sense and antisense) sequences corresponding to a first target sequence and second target sequence are hybridized to their corresponding sense and/or antisense sequences in the multifunctional siNA. In addition, various conjugates, ligands, aptamers, polymers or reporter molecules can be attached to the linker region for selective or improved delivery and/or pharmacokinetic properties.

[0380] FIG. 23 shows a non-limiting example of various dendrimer based multifunctional siNA designs.

[0381] FIG. 24 shows a non-limiting example of various supramolecular multifunctional siNA designs.

[0382] FIG. 25 shows a non-limiting example of a dicer enabled multifunctional siNA design using a 30 nucleotide precursor siNA construct. A 30 base pair duplex is cleaved by Dicer into 22 and 8 base pair products from either end (8 b.p. fragments not shown). For ease of presentation the overhangs generated by dicer are not shown—but can be compensated for. Three targeting sequences are shown. The required sequence identity overlapped is indicated by grey boxes. The N's of the parent 30 b.p. siNA are suggested sites of 2′-OH positions to enable Dicer cleavage if this is tested in stabilized chemistries. Note that processing of a 30 mer duplex by Dicer RNase III does not give a precise 22+8 cleavage, but rather produces a series of closely related products (with 22+8 being the primary site). Therefore, processing by Dicer will yield a series of active siNAs.

[0383] FIG. 26 shows a non-limiting example of a dicer enabled multifunctional siNA design using a 40 nucleotide precursor siNA construct. A 40 base pair duplex is cleaved by Dicer into 20 base pair products from either end. For ease of presentation the overhangs generated by dicer are not shown—but can be compensated for. Four targeting sequences are shown. The target sequences having homology are enclosed by boxes. This design format can be extended to larger RNAs. If chemically stabilized siNAs are bound by Dicer, then strategically located ribonucleotide linkages can enable designer cleavage products that permit our more extensive repertoire of multifunctional designs. For example cleavage products not limited to the Dicer standard of approximately 22-nucleotides can allow multifunctional siNA constructs with a target sequence identity overlap ranging from, for example, about 3 to about 15 nucleotides.

[0384] FIG. 27 shows a non-limiting example of additional multifunctional siNA construct designs of the invention. In one example, a conjugate, ligand, aptamer, label, or other moiety is attached to a region of the multifunctional siNA to enable improved delivery or pharmacokinetic profiling.

[0385] FIG. 28 shows a non-limiting example of additional multifunctional siNA construct designs of the invention. In one example, a conjugate, ligand, aptamer, label, or other moiety is attached to a region of the multifunctional siNA to enable improved delivery or pharmacokinetic profiling.

[0386] FIG. 29 shows a non-limiting example of IL-4 inhibition in HeLa cells using a dual luciferase reporter system. The IL-4 target site with flanking rat sequences was cloned into the 3′ untranslated region of Renilla luciferase to create a reporter plasmid. Specific siNA-induced degradation of the target sequence in Renilla mRNA transcribed from this plasmid results in a loss of Renilla luciferase signal in plasmid-transfected HeLa cells. The reporter plasmid also contains a copy of the Firefly luciferase gene, which does not contain the target site sequences. In HeLa cells co-transfected with the reporter plasmid and siNAs, the ratio of Renilla to Firefly luciferase activities (using two different substrates) provides a measure of siNA activity. The Firefly luciferase activity provides an internal control for transfection efficiency, toxicity and sample recovery. As shown in the Figure, treatment of the dual luciferase reporter system HeLa cells with 12.5 mM siNA targeting IL-4 resulted in marked inhibition of Renilla luciferase activity after 17 hours compared to untreated cells and cells treated with a matched chemistry inverted control. Compound numbers (see Table III, sense/antisense strand) of the siNA constructs and target sites within the IL-4 target are shown on the X-axis of the plot.

[0387] FIG. 30 shows a non-limiting example of IL-13 inhibition in HeLa cells using a dual luciferase reporter system. The IL-13 target site with flanking rat sequences was cloned into the 3′ untranslated region of Renilla luciferase to create a reporter plasmid. Specific siNA-induced degradation of the target sequence in Renilla mRNA transcribed from this plasmid results in a loss of Renilla luciferase signal in plasmid-transfected HeLa cells. The reporter plasmid also contains a copy of the Firefly luciferase gene, which does not contain the target site sequences. In HeLa cells co-transfected with the reporter plasmid and siNAs, the ratio of Renilla to Firefly luciferase activities (using two different substrates) provides a measure of siNA activity. The Firefly luciferase activity provides an internal control for transfection efficiency, toxicity and sample recovery. As shown in the Figure, treatment of the dual luciferase reporter system HeLa cells with 12.5 nM siNA targeting IL-13 resulted in marked inhibition of Renilla luciferase activity after 17 hours compared to untreated cells and cells treated with a matched chemistry inverted control. Compound numbers (see Table III, sense/antisense strand) of the siNA constructs and target sites within the IL-13 target are shown on the X-axis of the plot.

[0388] FIG. 31 shows a non-limiting example of a cholesterol linked phosphoramidite that can be used to synthesize cholesterol conjugated siNA molecules of the invention. An example is shown with the cholesterol moiety linked to the 5′-end of the sense strand of a siNA molecule.

### DETAILED DESCRIPTION OF THE INVENTION

### Mechanism of Action of Nucleic Acid Molecules of the Invention

[0389] The discussion that follows discusses the proposed mechanism of RNA interference mediated by short interfering RNA as is presently known, and is not meant to be limiting and is not an admission of prior art. Applicant demonstrates herein that chemically-modified short interfering nucleic acids possess similar or improved capacity to mediate RNAi as do siRNA molecules and are expected to possess improved stability and activity in vivo; therefore, this discussion is not meant to be limiting only to siRNA and can be applied to siNA as a whole. By “improved capacity to mediate RNAi” or “improved RNAi activity” is meant to include RNAi activity measured in vitro and/or in vivo where the RNAi activity is a reflection of both the ability of the siNA to mediate RNAi and the stability of the siNAs of the invention. In this invention, the product of these activities can be increased in vitro and/or in vivo compared to an all RNA siRNA or a siNA containing a plurality of ribonucleotides. In some cases, the activity or stability of the siNA molecule can be decreased (i.e., less than ten-fold), but the overall activity of the siNA molecule is enhanced in vitro and/or in vivo.

[0390] RNA interference refers to the process of sequence specific post-transcriptional gene silencing in animals mediated by short interfering RNAs (siRNAs) (Fire et al., 1998, Nature, 391, 806). The corresponding process in plants is commonly referred to as post-transcriptional gene silencing or RNA silencing and is also referred to as quelling in fungi. The process of post-transcriptional gene silencing is thought to be an evolutionarily-conserved cellular defense mechanism used to prevent the expression of foreign genes which is commonly shared by diverse flora and phyla (Fire et al., 1999, Trends Genet., 15, 358). Such protection from foreign gene expression may have evolved in response to the production of double-stranded RNAs (dsRNAs) derived from viral infection or the random integration of transposon elements into a host genome via a cellular response that specifically destroys homologous single-stranded RNA or viral genomic RNA. The presence of dsRNA in cells triggers the RNAi response though a mechanism that has yet to be fully characterized. This mechanism appears to be different from the interferon response that results from dsRNA-mediated activation of protein kinase PKR and 2′,5′-oligoadenylate synthetase resulting in non-specific cleavage of mRNA by ribonuclease L.

[0391] The presence of long dsRNAs in cells stimulates the activity of a ribonuclease III enzyme referred to as Dicer. Dicer is involved in the processing of the dsRNA into short pieces of dsRNA known as short interfering RNAs (siRNAs) (Berstein et al., 2001, Nature, 409, 363). Short interfering RNAs derived from Dicer activity are typically about 21 to about 23 nucleotides in length and comprise about 19 base pair duplexes. Dicer has also been implicated in the excision of 21- and 22-nucleotide small temporal RNAs (stRNAs) from precursor RNA of conserved structure that are implicated in translational control (Hutvagner et al., 2001, Science, 293, 834). The RNAi response also features an endonuclease complex containing a siRNA, commonly referred to as an RNA-induced silencing complex (RISC), which mediates cleavage of single-stranded RNA having sequence homologous to the siRNA. Cleavage of the target RNA takes place in the middle of the region complementary to the guide sequence of the siRNA duplex (Elbashir et al., 2001, Genes Dev., 15, 188). In addition, RNA interference can also involve small RNA (e.g., micro-RNA or miRNA) mediated gene silencing, presumably though cellular mechanisms that regulate chromatin structure and thereby prevent transcription of target gene sequences (see for example Allshire, 2002, Science, 297, 1818-1819; Volpe et al., 2002, Science, 297, 1833-1837; Jenuwein, 2002, Science, 297, 2215-2218; and Hall et al., 2002, Science, 297, 2232-2237). As such, siNA molecules of the invention can be used to mediate gene silencing via interaction with RNA transcripts or alternately by interaction with particular gene sequences, wherein such interaction results in gene silencing either at the transcriptional level or post-transcriptional level.

[0392] RNAi has been studied in a variety of systems. Fire et al., 1998, Nature, 391, 806, were the first to observe RNAi in C. elegans. Wianny and Goetz, 1999, Nature Cell Biol., 2, 70, describe RNAi mediated by dsRNA in mouse embryos. Hammond et al., 2000, Nature, 404, 293, describe RNAi in Drosophila cells transfected with dsRNA. Elbashir et al., 2001, Nature, 411, 494, describe RNAi induced by introduction of duplexes of synthetic 21-nucleotide RNAs in cultured mammalian cells including human embryonic kidney and HeLa cells. Recent work in Drosophila embryonic lysates has revealed certain requirements for siRNA length, structure, chemical composition, and sequence that are essential to mediate efficient RNAi activity. These studies have shown that 21 nucleotide siRNA duplexes are most active when containing two 2-nucleotide 3′-terminal nucleotide overhangs. Furthermore, substitution of one or both siRNA strands with 2′-deoxy or 2′-O-methyl nucleotides abolishes RNAi activity, whereas substitution of 3′-terminal siRNA nucleotides with deoxy nucleotides was shown to be tolerated. Mismatch sequences in the center of the siRNA duplex were also shown to abolish RNAi activity. In addition, these studies also indicate that the position of the cleavage site in the target RNA is defined by the 5′-end of the siRNA guide sequence rather than the 3′-end (Elbashir et al., 2001, EMBO J, 20, 6877). Other studies have indicated that a 5′-phosphate on the target-complementary strand of a siRNA duplex is required for siRNA activity and that ATP is utilized to maintain the 5′-phosphate moiety on the siRNA (Nykanen et al., 2001, Cell, 107, 309); however, siRNA molecules lacking a 5′-phosphate are active when introduced exogenously, suggesting that 5′-phosphorylation of siRNA constructs may occur in vivo.

### Duplex Forming Oligonucleotides (DFO) of the Invention

[0393] In one embodiment, the invention features siNA molecules comprising duplex forming oligonucleotides (DFO) that can self-assemble into double stranded oligonucleotides. The duplex forming oligonucleotides of the invention can be chemically synthesized or expressed from transcription units and/or vectors. The DFO molecules of the instant invention provide useful reagents and methods for a variety of therapeutic, diagnostic, agricultural, veterinary, target validation, genomic discovery, genetic engineering and pharmacogenomic applications.

[0394] Applicant demonstrates herein that certain oligonucleotides, referred to herein for convenience but not limitation as duplex forming oligonucleotides or DFO molecules, are potent mediators of sequence specific regulation of gene expression. The oligonucleotides of the invention are distinct from other nucleic acid sequences known in the art (e.g., siRNA, miRNA, stRNA, shRNA, antisense oligonucleotides etc.) in that they represent a class of linear polynucleotide sequences that are designed to self-assemble into double stranded oligonucleotides, where each strand in the double stranded oligonucleotides comprises a nucleotide sequence that is complementary to a target nucleic acid molecule. Nucleic acid molecules of the invention can thus self assemble into functional duplexes in which each strand of the duplex comprises the same polynucleotide sequence and each strand comprises a nucleotide sequence that is complementary to a target nucleic acid molecule.

[0395] Generally, double stranded oligonucleotides are formed by the assembly of two distinct oligonucleotide sequences where the oligonucleotide sequence of one strand is complementary to the oligonucleotide sequence of the second strand; such double stranded oligonucleotides are assembled from two separate oligonucleotides, or from a single molecule that folds on itself to form a double stranded structure, often referred to in the field as hairpin stem-loop structure (e.g., shRNA or short hairpin RNA). These double stranded oligonucleotides known in the art all have a common feature in that each strand of the duplex has a distinct nucleotide sequence.

[0396] Distinct from the double stranded nucleic acid molecules known in the art, the applicants have developed a novel, potentially cost effective and simplified method of forming a double stranded nucleic acid molecule starting from a single stranded or linear oligonucleotide. The two strands of the double stranded oligonucleotide formed according to the instant invention have the same nucleotide sequence and are not covalently linked to each other. Such double-stranded oligonucleotides molecules can be readily linked post-synthetically by methods and reagents known in the art and are within the scope of the invention. In one embodiment, the single stranded oligonucleotide of the invention (the duplex forming oligonucleotide) that forms a double stranded oligonucleotide comprises a first region and a second region, where the second region includes a nucleotide sequence that is an inverted repeat of the nucleotide sequence in the first region, or a portion thereof, such that the single stranded oligonucleotide self assembles to form a duplex oligonucleotide in which the nucleotide sequence of one strand of the duplex is the same as the nucleotide sequence of the second strand. Non-limiting examples of such duplex forming oligonucleotides are illustrated in FIGS. 14 and 15. These duplex forming oligonucleotides (DFOs) can optionally include certain palindrome or repeat sequences where such palindrome or repeat sequences are present in between the first region and the second region of the DFO.

[0397] In one embodiment, the invention features a duplex forming oligonucleotide (DFO) molecule, wherein the DFO comprises a duplex forming self complementary nucleic acid sequence that has nucleotide sequence complementary to an interleukin and/or interleukin receptor target nucleic acid sequence. The DFO molecule can comprise a single self complementary sequence or a duplex resulting from assembly of such self complementary sequences.

[0398] In one embodiment, a duplex forming oligonucleotide (DFO) of the invention comprises a first region and a second region, wherein the second region comprises a nucleotide sequence comprising an inverted repeat of nucleotide sequence of the first region such that the DFO molecule can assemble into a double stranded oligonucleotide. Such double stranded oligonucleotides can act as a short interfering nucleic acid (siNA) to modulate gene expression. Each strand of the double stranded oligonucleotide duplex formed by DFO molecules of the invention can comprise a nucleotide sequence region that is complementary to the same nucleotide sequence in a target nucleic acid molecule (e.g., target interleukin and/or interleukin receptor RNA).

[0399] In one embodiment, the invention features a single stranded DFO that can assemble into a double stranded oligonucleotide. The applicant has surprisingly found that a single stranded oligonucleotide with nucleotide regions of self complementarity can readily assemble into duplex oligonucleotide constructs. Such DFOs can assemble into duplexes that can inhibit gene expression in a sequence specific manner. The DFO molecules of the invention comprise a first region with nucleotide sequence that is complementary to the nucleotide sequence of a second region and where the sequence of the first region is complementary to a target nucleic acid (e.g., RNA). The DFO can form a double stranded oligonucleotide wherein a portion of each strand of the double stranded oligonucleotide comprises a sequence complementary to a target nucleic acid sequence.

[0400] In one embodiment, the invention features a double stranded oligonucleotide, wherein the two strands of the double stranded oligonucleotide are not covalently linked to each other, and wherein each strand of the double stranded oligonucleotide comprises a nucleotide sequence that is complementary to the same nucleotide sequence in a target nucleic acid molecule or a portion thereof (e.g., interleukin and/or interleukin receptor RNA target). In another embodiment, the two strands of the double stranded oligonucleotide share an identical nucleotide sequence of at least about 15, preferably at least about 16, 17, 18, 19, 20, or 21 nucleotides.

[0401] In one embodiment, a DFO molecule of the invention comprises a structure having Formula DFO-I:

[chemical structure]

wherein Z comprises a palindromic or repeat nucleic acid sequence optionally with one or more modified nucleotides (e.g., nucleotide with a modified base, such as 2-amino purine, 2-amino-1,6-dihydro purine or a universal base), for example of length about 2 to about 24 nucleotides in even numbers (e.g., about 2, 4, 6, 8, 10, 12, 14, 16, 18, 20, or 22 or 24 nucleotides), X represents a nucleic acid sequence, for example of length of about 1 to about 21 nucleotides (e.g., about 1, 2, 3, 4, 5, 6, 7, 8, 9, 10, 11, 12, 13, 14, 15, 16, 17, 18, 19, 20, or 21 nucleotides), X′ comprises a nucleic acid sequence, for example of length about 1 and about 21 nucleotides (e.g., about 1, 2, 3, 4, 5, 6, 7, 8, 9, 10, 11, 12, 13, 14, 15, 16, 17, 18, 19, 20 or 21 nucleotides) having nucleotide sequence complementarity to sequence X or a portion thereof, p comprises a terminal phosphate group that can be present or absent, and wherein sequence X and Z, either independently or together, comprise nucleotide sequence that is complementary to a target nucleic acid sequence or a portion thereof and is of length sufficient to interact (e.g., base pair) with the target nucleic acid sequence or a portion thereof (e.g., interleukin and/or interleukin receptor RNA target). For example, X independently can comprise a sequence from about 12 to about 21 or more (e.g., about 12, 13, 14, 15, 16, 17, 18, 19, 20, 21, or more) nucleotides in length that is complementary to nucleotide sequence in a target interleukin and/or interleukin receptor RNA or a portion thereof. In another non-limiting example, the length of the nucleotide sequence of X and Z together, when X is present, that is complementary to the target RNA or a portion thereof (e.g., interleukin and/or interleukin receptor RNA target) is from about 12 to about 21 or more nucleotides (e.g., about 12, 13, 14, 15, 16, 17, 18, 19, 20, 21, or more). In yet another non-limiting example, when X is absent, the length of the nucleotide sequence of Z that is complementary to the target interleukin and/or interleukin receptor RNA or a portion thereof is from about 12 to about 24 or more nucleotides (e.g., about 12, 14, 16, 18, 20, 22, 24, or more). In one embodiment X, Z and X′ are independently oligonucleotides, where X and/or Z comprises a nucleotide sequence of length sufficient to interact (e.g., base pair) with a nucleotide sequence in the target RNA or a portion thereof (e.g., interleukin and/or interleukin receptor RNA target). In one embodiment, the lengths of oligonucleotides X and X′ are identical. In another embodiment, the lengths of oligonucleotides X and X′ are not identical. In another embodiment, the lengths of oligonucleotides X and Z, or Z and X′, or X, Z and X′ are either identical or different.

[0402] When a sequence is described in this specification as being of “sufficient” length to interact (i.e., base pair) with another sequence, it is meant that the length is such that the number of bonds (e.g., hydrogen bonds) formed between the two sequences is enough to enable the two sequence to form a duplex under the conditions of interest. Such conditions can be in vitro (e.g., for diagnostic or assay purposes) or in vivo (e.g., for therapeutic purposes). It is a simple and routine matter to determine such lengths.

[0403] In one embodiment, the invention features a double stranded oligonucleotide construct having Formula DFO-I(a):

[chemical structure]

wherein Z comprises a palindromic or repeat nucleic acid sequence or palindromic or repeat-like nucleic acid sequence with one or more modified nucleotides (e.g., nucleotides with a modified base, such as 2-amino purine, 2-amino-1,6-dihydro purine or a universal base), for example of length about 2 to about 24 nucleotides in even numbers (e.g., about 2, 4, 6, 8, 10, 12, 14, 16, 18, 20, 22 or 24 nucleotides), X represents a nucleic acid sequence, for example of length about 1 to about 21 nucleotides (e.g., about 1, 2, 3, 4, 5, 6, 7, 8, 9, 10, 11, 12, 13, 14, 15, 16, 17, 18, 19, 20, or 21 nucleotides), X′ comprises a nucleic acid sequence, for example of length about 1 to about 21 nucleotides (e.g., about 1, 2, 3, 4, 5, 6, 7, 8, 9, 10, 11, 12, 13, 14, 15, 16, 17, 18, 19, 20 or 21 nucleotides) having nucleotide sequence complementarity to sequence X or a portion thereof, p comprises a terminal phosphate group that can be present or absent, and wherein each X and Z independently comprises a nucleotide sequence that is complementary to a target nucleic acid sequence or a portion thereof (e.g., interleukin and/or interleukin receptor RNA target) and is of length sufficient to interact with the target nucleic acid sequence of a portion thereof (e.g., interleukin and/or interleukin receptor RNA target). For example, sequence X independently can comprise a sequence from about 12 to about 21 or more nucleotides (e.g., about 12, 13, 14, 15, 16, 17, 18, 19, 20, 21, or more) in length that is complementary to a nucleotide sequence in a target RNA or a portion thereof (e.g., interleukin and/or interleukin receptor RNA target). In another non-limiting example, the length of the nucleotide sequence of X and Z together (when X is present) that is complementary to the target interleukin and/or interleukin receptor RNA or a portion thereof is from about 12 to about 21 or more nucleotides (e.g., about 12, 13, 14, 15, 16, 17, 18, 19, 20, 21, or more). In yet another non-limiting example, when X is absent, the length of the nucleotide sequence of Z that is complementary to the target interleukin and/or interleukin receptor RNA or a portion thereof is from about 12 to about 24 or more nucleotides (e.g., about 12, 14, 16, 18, 20, 22, 24 or more). In one embodiment X, Z and X′ are independently oligonucleotides, where X and/or Z comprises a nucleotide sequence of length sufficient to interact (e.g., base pair) with nucleotide sequence in the target RNA or a portion thereof (e.g., interleukin and/or interleukin receptor RNA target). In one embodiment, the lengths of oligonucleotides X and X′ are identical. In another embodiment, the lengths of oligonucleotides X and X′ are not identical. In another embodiment, the lengths of oligonucleotides X and Z or Z and X′ or X, Z and X′ are either identical or different. In one embodiment, the double stranded oligonucleotide construct of Formula I(a) includes one or more, specifically 1, 2, 3 or 4, mismatches, to the extent such mismatches do not significantly diminish the ability of the double stranded oligonucleotide to inhibit target gene expression.

[0404] In one embodiment, a DFO molecule of the invention comprises structure having Formula DFO-II:

[chemical structure]

wherein each X and X′ are independently oligonucleotides of length about 12 nucleotides to about 21 nucleotides, wherein X comprises, for example, a nucleic acid sequence of length about 12 to about 21 nucleotides (e.g., about 12, 13, 14, 15, 16, 17, 18, 19, 20 or 21 nucleotides), X′ comprises a nucleic acid sequence, for example of length about 12 to about 21 nucleotides (e.g., about 12, 13, 14, 15, 16, 17, 18, 19, 20, or 21 nucleotides) having nucleotide sequence complementarity to sequence X or a portion thereof, p comprises a terminal phosphate group that can be present or absent, and wherein X comprises a nucleotide sequence that is complementary to a target nucleic acid sequence (e.g., interleukin and/or interleukin receptor RNA) or a portion thereof and is of length sufficient to interact (e.g., base pair) with the target nucleic acid sequence of a portion thereof. In one embodiment, the length of oligonucleotides X and X′ are identical. In another embodiment the length of oligonucleotides X and X′ are not identical. In one embodiment, length of the oligonucleotides X and X′ are sufficient to form a relatively stable double stranded oligonucleotide.

[0405] In one embodiment, the invention features a double stranded oligonucleotide construct having Formula DFO-II(a):

[chemical structure]

wherein each X and X′ are independently oligonucleotides of length about 12 nucleotides to about 21 nucleotides, wherein X comprises a nucleic acid sequence, for example of length about 12 to about 21 nucleotides (e.g., about 12, 13, 14, 15, 16, 17, 18, 19, 20 or 21 nucleotides), X′ comprises a nucleic acid sequence, for example of length about 12 to about 21 nucleotides (e.g., about 12, 13, 14, 15, 16, 17, 18, 19, 20 or 21 nucleotides) having nucleotide sequence complementarity to sequence X or a portion thereof, p comprises a terminal phosphate group that can be present or absent, and wherein X comprises nucleotide sequence that is complementary to a target nucleic acid sequence or a portion thereof (e.g., interleukin and/or interleukin receptor RNA target) and is of length sufficient to interact (e.g., base pair) with the target nucleic acid sequence (e.g., interleukin and/or interleukin receptor RNA) or a portion thereof. In one embodiment, the lengths of oligonucleotides X and X′ are identical. In another embodiment, the lengths of oligonucleotides X and X′ are not identical. In one embodiment, the lengths of the oligonucleotides X and X′ are sufficient to form a relatively stable double stranded oligonucleotide. In one embodiment, the double stranded oligonucleotide construct of Formula II(a) includes one or more, specifically 1, 2, 3 or 4, mismatches, to the extent such mismatches do not significantly diminish the ability of the double stranded oligonucleotide to inhibit target gene expression.

[0406] In one embodiment, the invention features a DFO molecule having Formula DFO-I(b):

[chemical structure]

where Z comprises a palindromic or repeat nucleic acid sequence optionally including one or more non-standard or modified nucleotides (e.g., nucleotide with a modified base, such as 2-amino purine or a universal base) that can facilitate base-pairing with other nucleotides. Z can be, for example, of length sufficient to interact (e.g., base pair) with nucleotide sequence of a target nucleic acid (e.g., interleukin and/or interleukin receptor RNA) molecule, preferably of length of at least 12 nucleotides, specifically about 12 to about 24 nucleotides (e.g., about 12, 14, 16, 18, 20, 22 or 24 nucleotides). p represents a terminal phosphate group that can be present or absent.

[0407] In one embodiment, a DFO molecule having any of Formula DFO-I, DFO-I(a), DFO-I(b), DFO-II(a) or DFO-II can comprise chemical modifications as described herein without limitation, such as, for example, nucleotides having any of Formulae I-VII, stabilization chemistries as described in Table IV, or any other combination of modified nucleotides and non-nucleotides as described in the various embodiments herein.

[0408] In one embodiment, the palindrome or repeat sequence or modified nucleotide (e.g., nucleotide with a modified base, such as 2-amino purine or a universal base) in Z of DFO constructs having Formula DFO-I, DFO-I(a) and DFO-I(b), comprises chemically modified nucleotides that are able to interact with a portion of the target nucleic acid sequence (e.g., modified base analogs that can form Watson Crick base pairs or non-Watson Crick base pairs).

[0409] In one embodiment, a DFO molecule of the invention, for example a DFO having Formula DFO-I or DFO-II, comprises about 15 to about 40 nucleotides (e.g., about 15, 16, 17, 18, 19, 20, 21, 22, 23, 24, 25, 26, 27, 28, 29, 30, 31, 32, 33, 34, 35, 36, 37, 38, 39, or 40 nucleotides). In one embodiment, a DFO molecule of the invention comprises one or more chemical modifications. In a non-limiting example, the introduction of chemically modified nucleotides and/or non-nucleotides into nucleic acid molecules of the invention provides a powerful tool in overcoming potential limitations of in vivo stability and bioavailability inherent to unmodified RNA molecules that are delivered exogenously. For example, the use of chemically modified nucleic acid molecules can enable a lower dose of a particular nucleic acid molecule for a given therapeutic effect since chemically modified nucleic acid molecules tend to have a longer half-life in serum or in cells or tissues. Furthermore, certain chemical modifications can improve the bioavailability and/or potency of nucleic acid molecules by not only enhancing half-life but also facilitating the targeting of nucleic acid molecules to particular organs, cells or tissues and/or improving cellular uptake of the nucleic acid molecules. Therefore, even if the activity of a chemically modified nucleic acid molecule is reduced in vitro as compared to a native/unmodified nucleic acid molecule, for example when compared to an unmodified RNA molecule, the overall activity of the modified nucleic acid molecule can be greater than the native or unmodified nucleic acid molecule due to improved stability, potency, duration of effect, bioavailability and/or delivery of the molecule.

Multifunctional or Multi-Targeted siNA Molecules of the Invention

[0410] In one embodiment, the invention features siNA molecules comprising multifunctional short interfering nucleic acid (multifunctional siNA) molecules that modulate the expression of one or more genes in a biologic system, such as a cell, tissue, or organism. The multifunctional short interfering nucleic acid (multifunctional siNA) molecules of the invention can target more than one region a interleukin and/or interleukin receptor target nucleic acid sequence or can target sequences of more than one distinct target nucleic acid molecules, for example, interleukin and/or interleukin receptor, CHRM3 (see for example U.S. Ser. No. 10/919,866, incorporated by reference herein), ADAM33 (see for example U.S. Ser. No. 10/923,329, incorporated by reference herein), GPRA/AAA1 (see for example U.S. Ser. No. 10/923,182, incorporated by reference herein); and/or ADORA1 (see for example U.S. Ser. No. 10/224,005, incorporated by reference herein). The multifunctional siNA molecules of the invention can be chemically synthesized or expressed from transcription units and/or vectors. The multifunctional siNA molecules of the instant invention provide useful reagents and methods for a variety of human applications, therapeutic, cosmetic, diagnostic, agricultural, veterinary, target validation, genomic discovery, genetic engineering and pharmacogenomic applications.

[0411] Applicant demonstrates herein that certain oligonucleotides, referred to herein for convenience but not limitation as multifunctional short interfering nucleic acid or multifunctional siNA molecules, are potent mediators of sequence specific regulation of gene expression. The multifunctional siNA molecules of the invention are distinct from other nucleic acid sequences known in the art (e.g., siRNA, miRNA, stRNA, shRNA, antisense oligonucleotides, etc.) in that they represent a class of polynucleotide molecules that are designed such that each strand in the multifunctional siNA construct comprises a nucleotide sequence that is complementary to a distinct nucleic acid sequence in one or more target nucleic acid molecules. A single multifunctional siNA molecule (generally a double-stranded molecule) of the invention can thus target more than one (e.g., 2, 3, 4, 5, or more) differing target nucleic acid target molecules. Nucleic acid molecules of the invention can also target more than one (e.g., 2, 3, 4, 5, or more) region of the same target nucleic acid sequence. As such multifunctional siNA molecules of the invention are useful in down regulating or inhibiting the expression of one or more target nucleic acid molecules. For example, a multifunctional siNA molecule of the invention can target nucleic acid molecules encoding interleukin and/or interleukin receptor, CHRM3, ADAM33, GPRA/AAA1, and/or ADORA1 targets. By reducing or inhibiting expression of more than one target nucleic acid molecule with one multifunctional siNA construct, multifunctional siNA molecules of the invention represent a class of potent therapeutic agents that can provide simultaneous inhibition of multiple targets within a disease or pathogen related pathway. Such simultaneous inhibition can provide synergistic therapeutic treatment strategies without the need for separate preclinical and clinical development efforts or complex regulatory approval process.

[0412] Use of multifunctional siNA molecules that target more then one region of a target nucleic acid molecule (e.g., messenger RNA) is expected to provide potent inhibition of gene expression. For example, a single multifunctional siNA construct of the invention can target both conserved and variable regions of a target nucleic acid molecule, such as interleukin and/or interleukin receptor, CHRM3, ADAM33, GPRA/AAA1, and/or ADORA1 target RNA or DNA, thereby allowing down regulation or inhibition of different splice variants encoded by a single gene, or allowing for targeting of both coding and non-coding regions of a target nucleic acid molecule.

[0413] Generally, double stranded oligonucleotides are formed by the assembly of two distinct oligonucleotides where the oligonucleotide sequence of one strand is complementary to the oligonucleotide sequence of the second strand; such double stranded oligonucleotides are generally assembled from two separate oligonucleotides (e.g., siRNA). Alternately, a duplex can be formed from a single molecule that folds on itself (e.g., shRNA or short hairpin RNA). These double stranded oligonucleotides are known in the art to mediate RNA interference and all have a common feature wherein only one nucleotide sequence region (guide sequence or the antisense sequence) has complementarity to a target nucleic acid sequence, such as interleukin and/or interleukin receptor, CHRM3, ADAM33, GPRA/AAA1, and/or ADORA1 targets, and the other strand (sense sequence) comprises nucleotide sequence that is homologous to the target nucleic acid sequence. Generally, the antisense sequence is retained in the active RISC complex and guides the RISC to the target nucleotide sequence by means of complementary base-pairing of the antisense sequence with the target sequence for mediating sequence-specific RNA interference. It is known in the art that in some cell culture systems, certain types of unmodified siRNAs can exhibit “off target” effects. It is hypothesized that this off-target effect involves the participation of the sense sequence instead of the antisense sequence of the siRNA in the RISC complex (see for example Schwarz et al., 2003, Cell, 115, 199-208). In this instance the sense sequence is believed to direct the RISC complex to a sequence (off-target sequence) that is distinct from the intended target sequence, resulting in the inhibition of the off-target sequence. In these double stranded nucleic acid molecules, each strand is complementary to a distinct target nucleic acid sequence. However, the off-targets that are affected by these dsRNAs are not entirely predictable and are non-specific.

[0414] Distinct from the double stranded nucleic acid molecules known in the art, the applicants have developed a novel, potentially cost effective and simplified method of down regulating or inhibiting the expression of more than one target nucleic acid sequence using a single multifunctional siNA construct. The multifunctional siNA molecules of the invention are designed to be double-stranded or partially double stranded, such that a portion of each strand or region of the multifunctional siNA is complementary to a target nucleic acid sequence of choice. As such, the multifunctional siNA molecules of the invention are not limited to targeting sequences that are complementary to each other, but rather to any two differing target nucleic acid sequences. Multifunctional siNA molecules of the invention are designed such that each strand or region of the multifunctional siNA molecule, that is complementary to a given target nucleic acid sequence, is of suitable length (e.g., from about 16 to about 28 nucleotides in length, preferably from about 18 to about 28 nucleotides in length) for mediating RNA interference against the target nucleic acid sequence. The complementarity between the target nucleic acid sequence and a strand or region of the multifunctional siNA must be sufficient (at least about 8 base pairs) for cleavage of the target nucleic acid sequence by RNA interference. multifunctional siNA of the invention is expected to minimize off-target effects seen with certain siRNA sequences, such as those described in (Schwarz et al., supra).

[0415] It has been reported that dsRNAs of length between 29 base pairs and 36 base pairs (Tuschl et al., International PCT Publication No. WO 02/44321) do not mediate RNAi. One reason these dsRNAs are inactive may be the lack of turnover or dissociation of the strand that interacts with the target RNA sequence, such that the RISC complex is not able to efficiently interact with multiple copies of the target RNA resulting in a significant decrease in the potency and efficiency of the RNAi process. Applicant has surprisingly found that the multifunctional siNAs of the invention can overcome this hurdle and are capable of enhancing the efficiency and potency of RNAi process. As such, in certain embodiments of the invention, multifunctional siNAs of length of about 29 to about 36 base pairs can be designed such that, a portion of each strand of the multifunctional siNA molecule comprises a nucleotide sequence region that is complementary to a target nucleic acid of length sufficient to mediate RNAi efficiently (e.g., about 15 to about 23 base pairs) and a nucleotide sequence region that is not complementary to the target nucleic acid. By having both complementary and non-complementary portions in each strand of the multifunctional siNA, the multifunctional siNA can mediate RNA interference against a target nucleic acid sequence without being prohibitive to turnover or dissociation (e.g., where the length of each strand is too long to mediate RNAi against the respective target nucleic acid sequence). Furthermore, design of multifunctional siNA molecules of the invention with internal overlapping regions allows the multifunctional siNA molecules to be of favorable (decreased) size for mediating RNA interference and of size that is well suited for use as a therapeutic agent (e.g., wherein each strand is independently from about 18 to about 28 nucleotides in length). Non-limiting examples are illustrated in FIGS. 16-28.

[0416] In one embodiment, a multifunctional siNA molecule of the invention comprises a first region and a second region, where the first region of the multifunctional siNA comprises a nucleotide sequence complementary to a nucleic acid sequence of a first target nucleic acid molecule, and the second region of the multifunctional siNA comprises nucleic acid sequence complementary to a nucleic acid sequence of a second target nucleic acid molecule. In one embodiment, a multifunctional siNA molecule of the invention comprises a first region and a second region, where the first region of the multifunctional siNA comprises nucleotide sequence complementary to a nucleic acid sequence of the first region of a target nucleic acid molecule, and the second region of the multifunctional siNA comprises nucleotide sequence complementary to a nucleic acid sequence of a second region of a the target nucleic acid molecule. In another embodiment, the first region and second region of the multifunctional siNA can comprise separate nucleic acid sequences that share some degree of complementarity (e.g., from about 1 to about 10 complementary nucleotides). In certain embodiments, multifunctional siNA constructs comprising separate nucleic acid sequences can be readily linked post-synthetically by methods and reagents known in the art and such linked constructs are within the scope of the invention. Alternately, the first region and second region of the multifunctional siNA can comprise a single nucleic acid sequence having some degree of self complementarity, such as in a hairpin or stem-loop structure. Non-limiting examples of such double stranded and hairpin multifunctional short interfering nucleic acids are illustrated in FIGS. 16 and 17 respectively. These multifunctional short interfering nucleic acids (multifunctional siNAs) can optionally include certain overlapping nucleotide sequence where such overlapping nucleotide sequence is present in between the first region and the second region of the multifunctional siNA (see for example FIGS. 18 and 19).

[0417] In one embodiment, the invention features a multifunctional short interfering nucleic acid (multifunctional siNA) molecule, wherein each strand of the multifunctional siNA independently comprises a first region of nucleic acid sequence that is complementary to a distinct target nucleic acid sequence and the second region of nucleotide sequence that is not complementary to the target sequence. The target nucleic acid sequence of each strand is in the same target nucleic acid molecule or different target nucleic acid molecules.

[0418] In another embodiment, the multifunctional siNA comprises two strands, where: (a) the first strand comprises a region having sequence complementarity to a target nucleic acid sequence (complementary region 1) and a region having no sequence complementarity to the target nucleotide sequence (non-complementary region 1); (b) the second strand of the multifunction siNA comprises a region having sequence complementarity to a target nucleic acid sequence that is distinct from the target nucleotide sequence complementary to the first strand nucleotide sequence (complementary region 2), and a region having no sequence complementarity to the target nucleotide sequence of complementary region 2 (non-complementary region 2); (c) the complementary region 1 of the first strand comprises a nucleotide sequence that is complementary to a nucleotide sequence in the non-complementary region 2 of the second strand and the complementary region 2 of the second strand comprises a nucleotide sequence that is complementary to a nucleotide sequence in the non-complementary region 1 of the first strand. The target nucleic acid sequence of complementary region 1 and complementary region 2 is in the same target nucleic acid molecule or different target nucleic acid molecules.

[0419] In another embodiment, the multifunctional siNA comprises two strands, where: (a) the first strand comprises a region having sequence complementarity to a target nucleic acid sequence derived from a gene, such as interleukin and/or interleukin receptor, CHRM3, ADAM33, GPRA/AAA1, and/or ADORA1, (complementary region 1) and a region having no sequence complementarity to the target nucleotide sequence of complementary region 1 (non-complementary region 1); (b) the second strand of the multifunction siNA comprises a region having sequence complementarity to a target nucleic acid sequence derived from a gene that is distinct from the gene of complementary region 1 (complementary region 2), and a region having no sequence complementarity to the target nucleotide sequence of complementary region 2 (non-complementary region 2); (c) the complementary region 1 of the first strand comprises a nucleotide sequence that is complementary to a nucleotide sequence in the non-complementary region 2 of the second strand and the complementary region 2 of the second strand comprises a nucleotide sequence that is complementary to a nucleotide sequence in the non-complementary region 1 of the first strand.

[0420] In another embodiment, the multifunctional siNA comprises two strands, where: (a) the first strand comprises a region having sequence complementarity to a target nucleic acid sequence derived from a first gene, such as interleukin and/or interleukin receptor, CHRM3, ADAM33, GPRA/AAA1, and/or ADORA1, (complementary region 1) and a region having no sequence complementarity to the target nucleotide sequence of complementary region 1 (non-complementary region 1); (b) the second strand of the multifunction siNA comprises a region having sequence complementarity to a second target nucleic acid sequence distinct from the first target nucleic acid sequence of complementary region 1 (complementary region 2), provided, however, that the target nucleic acid sequence for complementary region 1 and target nucleic acid sequence for complementary region 2 are both derived from the same gene, and a region having no sequence complementarity to the target nucleotide sequence of complementary region 2 (non-complementary region 2); (c) the complementary region 1 of the first strand comprises a nucleotide sequence that is complementary to a nucleotide sequence in the non-complementary region 2 of the second strand and the complementary region 2 of the second strand comprises a nucleotide sequence that is complementary to nucleotide sequence in the non-complementary region 1 of the first strand.

[0421] In one embodiment, the invention features a multifunctional short interfering nucleic acid (multifunctional siNA) molecule, wherein the multifunctional siNA comprises two complementary nucleic acid sequences in which the first sequence comprises a first region having nucleotide sequence complementary to nucleotide sequence within a first target nucleic acid molecule, and in which the second sequence comprises a first region having nucleotide sequence complementary to a distinct nucleotide sequence within the same target nucleic acid molecule. Preferably, the first region of the first sequence is also complementary to the nucleotide sequence of the second region of the second sequence, and where the first region of the second sequence is complementary to the nucleotide sequence of the second region of the first sequence.

[0422] In one embodiment, the invention features a multifunctional short interfering nucleic acid (multifunctional siNA) molecule, wherein the multifunctional siNA comprises two complementary nucleic acid sequences in which the first sequence comprises a first region having a nucleotide sequence complementary to a nucleotide sequence within a first target nucleic acid molecule, and in which the second sequence comprises a first region having a nucleotide sequence complementary to a distinct nucleotide sequence within a second target nucleic acid molecule. Preferably, the first region of the first sequence is also complementary to the nucleotide sequence of the second region of the second sequence, and where the first region of the second sequence is complementary to the nucleotide sequence of the second region of the first sequence.

[0423] In one embodiment, the invention features a multifunctional siNA molecule comprising a first region and a second region, where the first region comprises a nucleic acid sequence having about 18 to about 28 nucleotides complementary to a nucleic acid sequence within a first target nucleic acid molecule, and the second region comprises nucleotide sequence having about 18 to about 28 nucleotides complementary to a distinct nucleic acid sequence within a second target nucleic acid molecule.

[0424] In one embodiment, the invention features a multifunctional siNA molecule comprising a first region and a second region, where the first region comprises nucleic acid sequence having about 18 to about 28 nucleotides complementary to a nucleic acid sequence within a target nucleic acid molecule, and the second region comprises nucleotide sequence having about 18 to about 28 nucleotides complementary to a distinct nucleic acid sequence within the same target nucleic acid molecule.

[0425] In one embodiment, the invention features a double stranded multifunctional short interfering nucleic acid (multifunctional siNA) molecule, wherein one strand of the multifunctional siNA comprises a first region having nucleotide sequence complementary to a first target nucleic acid sequence, and the second strand comprises a first region having a nucleotide sequence complementary to a second target nucleic acid sequence. The first and second target nucleic acid sequences can be present in separate target nucleic acid molecules or can be different regions within the same target nucleic acid molecule. As such, multifunctional siNA molecules of the invention can be used to target the expression of different genes, splice variants of the same gene, both mutant and conserved regions of one or more gene transcripts, or both coding and non-coding sequences of the same or differing genes or gene transcripts.

[0426] In one embodiment, a target nucleic acid molecule of the invention encodes a single protein. In another embodiment, a target nucleic acid molecule encodes more than one protein (e.g., 1, 2, 3, 4, 5 or more proteins). As such, a multifunctional siNA construct of the invention can be used to down regulate or inhibit the expression of several proteins. For example, a multifunctional siNA molecule comprising a region in one strand having nucleotide sequence complementarity to a first target nucleic acid sequence derived from a gene encoding one protein and the second strand comprising a region with nucleotide sequence complementarity to a second target nucleic acid sequence present in target nucleic acid molecules derived from genes encoding two or more proteins (e.g., two or more differing interleukin, interleukin receptor, CHRM3, ADAM33, GPRA/AAA1, and/or ADORA1 target sequences) can be used to down regulate, inhibit, or shut down a particular biologic pathway by targeting, for example, two or more targets involved in a biologic pathway.

[0427] In one embodiment the invention takes advantage of conserved nucleotide sequences present in different isoforms of cytokines or ligands and receptors for the cytokines or ligands. By designing multifunctional siNAs in a manner where one strand includes a sequence that is complementary to a target nucleic acid sequence conserved among various isoforms of a cytokine and the other strand includes sequence that is complementary to a target nucleic acid sequence conserved among the receptors for the cytokine, it is possible to selectively and effectively modulate or inhibit a biological pathway or multiple genes in a biological pathway using a single multifunctional siNA.

[0428] In one embodiment, a double stranded multifunctional siNA molecule of the invention comprises a structure having Formula MF-I:

[chemical structure]

wherein each 5′-p-XZX′-3′ and 5′-p-YZY′-3′ are independently an oligonucleotide of length of about 20 nucleotides to about 300 nucleotides, preferably of about 20 to about 200 nucleotides, about 20 to about 100 nucleotides, about 20 to about 40 nucleotides, about 20 to about 40 nucleotides, about 24 to about 38 nucleotides, or about 26 to about 38 nucleotides; XZ comprises a nucleic acid sequence that is complementary to a first target nucleic acid sequence; YZ is an oligonucleotide comprising nucleic acid sequence that is complementary to a second target nucleic acid sequence; Z comprises nucleotide sequence of length about 1 to about 24 nucleotides (e.g., about 1, 2, 3, 4, 5, 6, 7, 8, 9, 10, 11, 12, 13, 14, 15, 16, 17, 18, 19, 20, 21, 22, 23, or 24 nucleotides) that is self complimentary; X comprises nucleotide sequence of length about 1 to about 100 nucleotides, preferably about 1 to about 21 nucleotides (e.g., about 1, 2, 3, 4, 5, 6, 7, 8, 9, 10, 11, 12, 13, 14, 15, 16, 17, 18, 19, 20, or 21 nucleotides) that is complementary to nucleotide sequence present in region Y′; Y comprises nucleotide sequence of length about 1 to about 100 nucleotides, preferably about 1- about 21 nucleotides (e.g., about 1, 2, 3, 4, 5, 6, 7, 8, 9, 10, 11, 12, 13, 14, 15, 16, 17, 18, 19, 20 or 21 nucleotides) that is complementary to nucleotide sequence present in region X′; each p comprises a terminal phosphate group that is independently present or absent; each XZ and YZ is independently of length sufficient to stably interact (i.e., base pair) with the first and second target nucleic acid sequence, respectively, or a portion thereof. For example, each sequence X and Y can independently comprise sequence from about 12 to about 21 or more nucleotides in length (e.g., about 12, 13, 14, 15, 16, 17, 18, 19, 20, 21, or more) that is complementary to a target nucleotide sequence in different target nucleic acid molecules, such as target RNAs or a portion thereof. In another non-limiting example, the length of the nucleotide sequence of X and Z together that is complementary to the first target nucleic acid sequence or a portion thereof is from about 12 to about 21 or more nucleotides (e.g., about 12, 13, 14, 15, 16, 17, 18, 19, 20, 21, or more). In another non-limiting example, the length of the nucleotide sequence of Y and Z together, that is complementary to the second target nucleic acid sequence or a portion thereof is from about 12 to about 21 or more nucleotides (e.g., about 12, 13, 14, 15, 16, 17, 18, 19, 20, 21, or more). In one embodiment, the first target nucleic acid sequence and the second target nucleic acid sequence are present in the same target nucleic acid molecule (e.g., interleukin and/or interleukin receptor RNA). In another embodiment, the first target nucleic acid sequence and the second target nucleic acid sequence are present in different target nucleic acid molecules (e.g., interleukin, interleukin receptor, CHRM3, ADAM33, GPRA/AAA1, and/or ADORA1 targets). In one embodiment, Z comprises a palindrome or a repeat sequence. In one embodiment, the lengths of oligonucleotides X and X′ are identical. In another embodiment, the lengths of oligonucleotides X and X′ are not identical. In one embodiment, the lengths of oligonucleotides Y and Y′ are identical. In another embodiment, the lengths of oligonucleotides Y and Y′ are not identical. In one embodiment, the double stranded oligonucleotide construct of Formula I(a) includes one or more, specifically 1, 2, 3 or 4, mismatches, to the extent such mismatches do not significantly diminish the ability of the double stranded oligonucleotide to inhibit target gene expression.

[0429] In one embodiment, a multifunctional siNA molecule of the invention comprises a structure having Formula MF-II:

[chemical structure]

wherein each 5′-p-XX′-3′ and 5′-p-YY′-3′ are independently an oligonucleotide of length of about 20 nucleotides to about 300 nucleotides, preferably about 20 to about 200 nucleotides, about 20 to about 100 nucleotides, about 20 to about 40 nucleotides, about 20 to about 40 nucleotides, about 24 to about 38 nucleotides, or about 26 to about 38 nucleotides; X comprises a nucleic acid sequence that is complementary to a first target nucleic acid sequence; Y is an oligonucleotide comprising nucleic acid sequence that is complementary to a second target nucleic acid sequence; X comprises a nucleotide sequence of length about 1 to about 100 nucleotides, preferably about 1 to about 21 nucleotides (e.g., about 1, 2, 3, 4, 5, 6, 7, 8, 9, 10, 11, 12, 13, 14, 15, 16, 17, 18, 19, 20, or 21 nucleotides) that is complementary to nucleotide sequence present in region Y′; Y comprises nucleotide sequence of length about 1 to about 100 nucleotides, preferably about 1 to about 21 nucleotides (e.g., about 1, 2, 3, 4, 5, 6, 7, 8, 9, 10, 11, 12, 13, 14, 15, 16, 17, 18, 19, 20 or 21 nucleotides) that is complementary to nucleotide sequence present in region X′; each p comprises a terminal phosphate group that is independently present or absent; each X and Y independently is of length sufficient to stably interact (i.e., base pair) with the first and second target nucleic acid sequence, respectively, or a portion thereof. For example, each sequence X and Y can independently comprise sequence from about 12 to about 21 or more nucleotides in length (e.g., about 12, 13, 14, 15, 16, 17, 18, 19, 20, 21, or more) that is complementary to a target nucleotide sequence in different target nucleic acid molecules, such as interleukin, interleukin receptor, CHRM3, ADAM33, GPRA/AAA1, and/or ADORA1 target RNAs or a portion thereof. In one embodiment, the first target nucleic acid sequence and the second target nucleic acid sequence are present in the same target nucleic acid molecule (e.g., interleukin and/or interleukin receptor RNA or DNA). In another embodiment, the first target nucleic acid sequence and the second target nucleic acid sequence are present in different target nucleic acid molecules, such as interleukin, interleukin receptor, CHRM3, ADAM33, GPRA/AAA1, and/or ADORA1 target sequences or a portion thereof. In one embodiment, Z comprises a palindrome or a repeat sequence. In one embodiment, the lengths of oligonucleotides X and X′ are identical. In another embodiment, the lengths of oligonucleotides X and X′ are not identical. In one embodiment, the lengths of oligonucleotides Y and Y′ are identical. In another embodiment, the lengths of oligonucleotides Y and Y′ are not identical. In one embodiment, the double stranded oligonucleotide construct of Formula I(a) includes one or more, specifically 1, 2, 3 or 4, mismatches, to the extent such mismatches do not significantly diminish the ability of the double stranded oligonucleotide to inhibit target gene expression.

[0430] In one embodiment, a multifunctional siNA molecule of the invention comprises a structure having Formula MF-III:

[chemical structure]

wherein each X, X′, Y, and Y′ is independently an oligonucleotide of length of about 15 nucleotides to about 50 nucleotides, preferably about 18 to about 40 nucleotides, or about 19 to about 23 nucleotides; X comprises nucleotide sequence that is complementary to nucleotide sequence present in region Y′; X′ comprises nucleotide sequence that is complementary to nucleotide sequence present in region Y; each X and X′ is independently of length sufficient to stably interact (i.e., base pair) with a first and a second target nucleic acid sequence, respectively, or a portion thereof; W represents a nucleotide or non-nucleotide linker that connects sequences Y′ and Y; and the multifunctional siNA directs cleavage of the first and second target sequence via RNA interference. In one embodiment, the first target nucleic acid sequence and the second target nucleic acid sequence are present in the same target nucleic acid molecule (e.g., interleukin and/or interleukin receptor RNA). In another embodiment, the first target nucleic acid sequence and the second target nucleic acid sequence are present in different target nucleic acid molecules such as interleukin, interleukin receptor, CHRM3, ADAM33, GPRA/AAA1, and/or ADORA1 target sequences or a portion thereof. In one embodiment, region W connects the 3′-end of sequence Y′ with the 3′-end of sequence Y. In one embodiment, region W connects the 3′-end of sequence Y′ with the 5′-end of sequence Y. In one embodiment, region W connects the 5′-end of sequence Y′ with the 5′-end of sequence Y. In one embodiment, region W connects the 5′-end of sequence Y′ with the 3′-end of sequence Y. In one embodiment, a terminal phosphate group is present at the 5′-end of sequence X. In one embodiment, a terminal phosphate group is present at the 5′-end of sequence X′. In one embodiment, a terminal phosphate group is present at the 5′-end of sequence Y. In one embodiment, a terminal phosphate group is present at the 5′-end of sequence Y′. In one embodiment, W connects sequences Y and Y′ via a biodegradable linker. In one embodiment, W further comprises a conjugate, label, aptamer, ligand, lipid, or polymer.

[0431] In one embodiment, a multifunctional siNA molecule of the invention comprises a structure having Formula MF-IV:

[chemical structure]

wherein each X, X′, Y, and Y′ is independently an oligonucleotide of length of about 15 nucleotides to about 50 nucleotides, preferably about 18 to about 40 nucleotides, or about 19 to about 23 nucleotides; X comprises nucleotide sequence that is complementary to nucleotide sequence present in region Y′; X′ comprises nucleotide sequence that is complementary to nucleotide sequence present in region Y; each Y and Y′ is independently of length sufficient to stably interact (i.e., base pair) with a first and a second target nucleic acid sequence, respectively, or a portion thereof; W represents a nucleotide or non-nucleotide linker that connects sequences Y′ and Y; and the multifunctional siNA directs cleavage of the first and second target sequence via RNA interference. In one embodiment, the first target nucleic acid sequence and the second target nucleic acid sequence are present in the same target nucleic acid molecule (e.g., interleukin and/or interleukin receptor RNA). In another embodiment, the first target nucleic acid sequence and the second target nucleic acid sequence are present in different target nucleic acid molecules, such as interleukin, interleukin receptor, CHRM3, ADAM33, GPRA/AAA1, and/or ADORA1 target sequences or a portion thereof. In one embodiment, region W connects the 3′-end of sequence Y′ with the 3′-end of sequence Y. In one embodiment, region W connects the 3′-end of sequence Y′ with the 5′-end of sequence Y. In one embodiment, region W connects the 5′-end of sequence Y′ with the 5′-end of sequence Y. In one embodiment, region W connects the 5′-end of sequence Y′ with the 3′-end of sequence Y. In one embodiment, a terminal phosphate group is present at the 5′-end of sequence X. In one embodiment, a terminal phosphate group is present at the 5′-end of sequence X′. In one embodiment, a terminal phosphate group is present at the 5′-end of sequence Y. In one embodiment, a terminal phosphate group is present at the 5′-end of sequence Y′. In one embodiment, W connects sequences Y and Y′ via a biodegradable linker. In one embodiment, W further comprises a conjugate, label, aptamer, ligand, lipid, or polymer.

[0432] In one embodiment, a multifunctional siNA molecule of the invention comprises a structure having Formula MF-V:

[chemical structure]

wherein each X, X′, Y, and Y′ is independently an oligonucleotide of length of about 15 nucleotides to about 50 nucleotides, preferably about 18 to about 40 nucleotides, or about 19 to about 23 nucleotides; X comprises nucleotide sequence that is complementary to nucleotide sequence present in region Y′; X′ comprises nucleotide sequence that is complementary to nucleotide sequence present in region Y; each X, X′, Y, or Y′ is independently of length sufficient to stably interact (i.e., base pair) with a first, second, third, or fourth target nucleic acid sequence, respectively, or a portion thereof; W represents a nucleotide or non-nucleotide linker that connects sequences Y′ and Y; and the multifunctional siNA directs cleavage of the first, second, third, and/or fourth target sequence via RNA interference. In one embodiment, the first, second, third and fourth target nucleic acid sequence are all present in the same target nucleic acid molecule (e.g., interleukin and/or interleukin receptor RNA). In another embodiment, the first, second, third and fourth target nucleic acid sequence are independently present in different target nucleic acid molecules, such as interleukin, interleukin receptor, CHRM3, ADAM33, GPRA/AAA1, and/or ADORA1 target sequences or a portion thereof. In one embodiment, region W connects the 3′-end of sequence Y′ with the 3′-end of sequence Y. In one embodiment, region W connects the 3′-end of sequence Y′ with the 5′-end of sequence Y. In one embodiment, region W connects the 5′-end of sequence Y′ with the 5′-end of sequence Y. In one embodiment, region W connects the 5′-end of sequence Y′ with the 3′-end of sequence Y. In one embodiment, a terminal phosphate group is present at the 5′-end of sequence X. In one embodiment, a terminal phosphate group is present at the 5′-end of sequence X′. In one embodiment, a terminal phosphate group is present at the 5′-end of sequence Y. In one embodiment, a terminal phosphate group is present at the 5′-end of sequence Y′. In one embodiment, W connects sequences Y and Y′ via a biodegradable linker. In one embodiment, W further comprises a conjugate, label, aptamer, ligand, lipid, or polymer.

[0433] In one embodiment, regions X and Y of multifunctional siNA molecule of the invention (e.g., having any of Formula MF-1-MF-V), are complementary to different target nucleic acid sequences that are portions of the same target nucleic acid molecule. In one embodiment, such target nucleic acid sequences are at different locations within the coding region of a RNA transcript. In one embodiment, such target nucleic acid sequences comprise coding and non-coding regions of the same RNA transcript. In one embodiment, such target nucleic acid sequences comprise regions of alternately spliced transcripts or precursors of such alternately spliced transcripts.

[0434] In one embodiment, a multifunctional siNA molecule having any of Formula MF-1-MF-V can comprise chemical modifications as described herein without limitation, such as, for example, nucleotides having any of Formulae I-VII described herein, stabilization chemistries as described in Table IV, or any other combination of modified nucleotides and non-nucleotides as described in the various embodiments herein.

[0435] In one embodiment, the palindrome or repeat sequence or modified nucleotide (e.g., nucleotide with a modified base, such as 2-amino purine or a universal base) in Z of multifunctional siNA constructs having Formula MF-I or MF-II comprises chemically modified nucleotides that are able to interact with a portion of the target nucleic acid sequence (e.g., modified base analogs that can form Watson Crick base pairs or non-Watson Crick base pairs).

[0436] In one embodiment, a multifunctional siNA molecule of the invention, for example each strand of a multifunctional siNA having MF-I-MF-V, independently comprises about 15 to about 40 nucleotides (e.g., about 15, 16, 17, 18, 19, 20, 21, 22, 23, 24, 25, 26, 27, 28, 29, 30, 31, 32, 33, 34, 35, 36, 37, 38, 39, or 40 nucleotides). In one embodiment, a multifunctional siNA molecule of the invention comprises one or more chemical modifications. In a non-limiting example, the introduction of chemically modified nucleotides and/or non-nucleotides into nucleic acid molecules of the invention provides a powerful tool in overcoming potential limitations of in vivo stability and bioavailability inherent to unmodified RNA molecules that are delivered exogenously. For example, the use of chemically modified nucleic acid molecules can enable a lower dose of a particular nucleic acid molecule for a given therapeutic effect since chemically modified nucleic acid molecules tend to have a longer half-life in serum or in cells or tissues. Furthermore, certain chemical modifications can improve the bioavailability and/or potency of nucleic acid molecules by not only enhancing half-life but also facilitating the targeting of nucleic acid molecules to particular organs, cells or tissues and/or improving cellular uptake of the nucleic acid molecules. Therefore, even if the activity of a chemically modified nucleic acid molecule is reduced in vitro as compared to a native/unmodified nucleic acid molecule, for example when compared to an unmodified RNA molecule, the overall activity of the modified nucleic acid molecule can be greater than the native or unmodified nucleic acid molecule due to improved stability, potency, duration of effect, bioavailability and/or delivery of the molecule.

[0437] In another embodiment, the invention features multifunctional siNAs, wherein the multifunctional siNAs are assembled from two separate double-stranded siNAs, with one of the ends of each sense strand is tethered to the end of the sense strand of the other siNA molecule, such that the two antisense siNA strands are annealed to their corresponding sense strand that are tethered to each other at one end (see FIG. 22). The tethers or linkers can be nucleotide-based linkers or non-nucleotide based linkers as generally known in the art and as described herein.

[0438] In one embodiment, the invention features a multifunctional siNA, wherein the multifunctional siNA is assembled from two separate double-stranded siNAs, with the 5′-end of one sense strand of the siNA is tethered to the 5′-end of the sense strand of the other siNA molecule, such that the 5′-ends of the two antisense siNA strands, annealed to their corresponding sense strand that are tethered to each other at one end, point away (in the opposite direction) from each other (see FIG. 22 (A)). The tethers or linkers can be nucleotide-based linkers or non-nucleotide based linkers as generally known in the art and as described herein.

[0439] In one embodiment, the invention features a multifunctional siNA, wherein the multifunctional siNA is assembled from two separate double-stranded siNAs, with the 3′-end of one sense strand of the siNA is tethered to the 3′-end of the sense strand of the other siNA molecule, such that the 5′-ends of the two antisense siNA strands, annealed to their corresponding sense strand that are tethered to each other at one end, face each other (see FIG. 22 (B)). The tethers or linkers can be nucleotide-based linkers or non-nucleotide based linkers as generally known in the art and as described herein.

[0440] In one embodiment, the invention features a multifunctional siNA, wherein the multifunctional siNA is assembled from two separate double-stranded siNAs, with the 5′-end of one sense strand of the siNA is tethered to the 3′-end of the sense strand of the other siNA molecule, such that the 5′-end of the one of the antisense siNA strands annealed to their corresponding sense strand that are tethered to each other at one end, faces the 3′-end of the other antisense strand (see FIG. 22 (C-D)). The tethers or linkers can be nucleotide-based linkers or non-nucleotide based linkers as generally known in the art and as described herein.

[0441] In one embodiment, the invention features a multifunctional siNA, wherein the multifunctional siNA is assembled from two separate double-stranded siNAs, with the 5′-end of one antisense strand of the siNA is tethered to the 3′-end of the antisense strand of the other siNA molecule, such that the 5′-end of the one of the sense siNA strands annealed to their corresponding antisense sense strand that are tethered to each other at one end, faces the 3′-end of the other sense strand (see FIG. 22 (G-H)). In one embodiment, the linkage between the 5′-end of the first antisense strand and the 3′-end of the second antisense strand is designed in such a way as to be readily cleavable (e.g., biodegradable linker) such that the 5′ end of each antisense strand of the multifunctional siNA has a free 5′-end suitable to mediate RNA interference-based cleavage of the target RNA. The tethers or linkers can be nucleotide-based linkers or non-nucleotide based linkers as generally known in the art and as described herein.

[0442] In one embodiment, the invention features a multifunctional siNA, wherein the multifunctional siNA is assembled from two separate double-stranded siNAs, with the 5′-end of one antisense strand of the siNA is tethered to the 5′-end of the antisense strand of the other siNA molecule, such that the 3′-end of the one of the sense siNA strands annealed to their corresponding antisense sense strand that are tethered to each other at one end, faces the 3′-end of the other sense strand (see FIG. 22 (E)). In one embodiment, the linkage between the 5′-end of the first antisense strand and the 5′-end of the second antisense strand is designed in such a way as to be readily cleavable (e.g., biodegradable linker) such that the 5′ end of each antisense strand of the multifunctional siNA has a free 5′-end suitable to mediate RNA interference-based cleavage of the target RNA. The tethers or linkers can be nucleotide-based linkers or non-nucleotide based linkers as generally known in the art and as described herein.

[0443] In one embodiment, the invention features a multifunctional siNA, wherein the multifunctional siNA is assembled from two separate double-stranded siNAs, with the 3′-end of one antisense strand of the siNA is tethered to the 3′-end of the antisense strand of the other siNA molecule, such that the 5′-end of the one of the sense siNA strands annealed to their corresponding antisense sense strand that are tethered to each other at one end, faces the 3′-end of the other sense strand (see FIG. 22 (F)). In one embodiment, the linkage between the 5′-end of the first antisense strand and the 5′-end of the second antisense strand is designed in such a way as to be readily cleavable (e.g., biodegradable linker) such that the 5′ end of each antisense strand of the multifunctional siNA has a free 5′-end suitable to mediate RNA interference-based cleavage of the target RNA. The tethers or linkers can be nucleotide-based linkers or non-nucleotide based linkers as generally known in the art and as described herein.

[0444] In any of the above embodiments, a first target nucleic acid sequence or second target nucleic acid sequence can independently comprise interleukin, interleukin receptor, CHRM3, ADAM33, GPRA/AAA1, and/or ADORA1 RNA, DNA or a portion thereof. In one embodiment, the first target nucleic acid sequence is a interleukin and/or interleukin receptor RNA, DNA or a portion thereof and the second target nucleic acid sequence is a interleukin and/or interleukin receptor RNA, DNA of a portion thereof. In one embodiment, the first target nucleic acid sequence is a first interleukin (e.g., IL-1, IL-2, IL-3, IL-4, IL-S, IL-6, IL-7, IL-8, IL-9, IL-10, IL-11, IL-12, IL-13, IL-14, IL-15, IL-16, IL-17, IL-18, IL-19, IL-20, IL-21, IL-22, IL-23, IL-24, IL-25, IL-26, or IL-27) or interleukin receptor (e.g., IL-1R, IL-2R, IL-3R, IL-4R, IL-5R, IL-6R, IL-7R, IL-8R, IL-9R, IL-10R, IL-11R, IL-12R, IL-13R, IL-14R, IL-15R, IL-16R, IL-17R, IL-18R, IL-19R, IL-20R, IL-21R, IL-22R, IL-23R, IL-24R, IL-25R, IL-26R, or IL-27R) RNA, DNA or a portion thereof and the second target nucleic acid sequence is a second interleukin (e.g., IL-1, IL-2, IL-3, IL-4, IL-5, IL-6, IL-7, IL-8, IL-9, IL-10, IL-11, IL-12, IL-13, IL-14, IL-15, IL-16, IL-17, IL-18, IL-19, IL-20, IL-21, IL-22, IL-23, IL-24, IL-25, IL-26, or IL-27) or interleukin receptor (e.g., IL-1R, IL-2R, IL-3R, IL-4R, IL-5R, IL-6R, IL-7R, IL-8R, IL-9R, IL-10R, IL-11R, IL-12R, IL-13R, IL-14R, IL-15R, IL-16R, IL-17R, IL-18R, IL-19R, IL-20R, IL-21R, IL-22R, IL-23R, IL-24R, IL-25R, IL-26R, or IL-27R) RNA, DNA of a portion thereof. In one embodiment, the first target nucleic acid sequence is a interleukin and/or interleukin receptor RNA, DNA or a portion thereof and the second target nucleic acid sequence is a CHRM3 RNA, DNA of a portion thereof. In one embodiment, the first target nucleic acid sequence is a interleukin and/or interleukin receptor RNA, DNA or a portion thereof and the second target nucleic acid sequence is a GPRA/AAA1 RNA, DNA or a portion thereof. In one embodiment, the first target nucleic acid sequence is a interleukin and/or interleukin receptor RNA, DNA or a portion thereof and the second target nucleic acid sequence is an ADORA1 RNA, DNA or a portion thereof. In one embodiment, the first target nucleic acid sequence is a interleukin and/or interleukin receptor RNA, DNA or a portion thereof and the second target nucleic acid sequence is an ADAM33 RNA, DNA or a portion thereof. In one embodiment, the first target nucleic acid sequence is a IL-4 RNA, DNA or a portion thereof and the second target nucleic acid sequence is an IL-4R RNA, DNA or a portion thereof. In one embodiment, the first target nucleic acid sequence is a IL-13 RNA, DNA or a portion thereof and the second target nucleic acid sequence is an IL-13R RNA, DNA or a portion thereof.

### Synthesis of Nucleic Acid Molecules

[0445] Synthesis of nucleic acids greater than 100 nucleotides in length is difficult using automated methods, and the therapeutic cost of such molecules is prohibitive. In this invention, small nucleic acid motifs (“small” refers to nucleic acid motifs no more than 100 nucleotides in length, preferably no more than 80 nucleotides in length, and most preferably no more than 50 nucleotides in length; e.g., individual siNA oligonucleotide sequences or siNA sequences synthesized in tandem) are preferably used for exogenous delivery. The simple structure of these molecules increases the ability of the nucleic acid to invade targeted regions of protein and/or RNA structure. Exemplary molecules of the instant invention are chemically synthesized, and others can similarly be synthesized.

[0446] Oligonucleotides (e.g., certain modified oligonucleotides or portions of oligonucleotides lacking ribonucleotides) are synthesized using protocols known in the art, for example as described in Caruthers et al., 1992, Methods in Enzymology 211, 3-19, Thompson et al., International PCT Publication No. WO 99/54459, Wincott et al., 1995, Nucleic Acids Res. 23, 2677-2684, Wincott et al., 1997, Methods Mol. Bio., 74, 59, Brennan et al., 1998, Biotechnol Bioeng., 61, 33-45, and Brennan, U.S. Pat. No. 6,001,311. All of these references are incorporated herein by reference. The synthesis of oligonucleotides makes use of common nucleic acid protecting and coupling groups, such as dimethoxytrityl at the 5′-end, and phosphoramidites at the 3′-end. In a non-limiting example, small scale syntheses are conducted on a 394 Applied Biosystems, Inc. synthesizer using a 0.2 μmol scale protocol with a 2.5 min coupling step for 2′-O-methylated nucleotides and a 45 second coupling step for 2′-deoxy nucleotides or 2′-deoxy-2′-fluoro nucleotides. Table V outlines the amounts and the contact times of the reagents used in the synthesis cycle. Alternatively, syntheses at the 0.2 μmol scale can be performed on a 96-well plate synthesizer, such as the instrument produced by Protogene (Palo Alto, Calif.) with minimal modification to the cycle. A 33-fold excess (60 μL of 0.11 M=6.6 μmol) of 2′-O-methyl phosphoramidite and a 105-fold excess of S-ethyl tetrazole (60 μL of 0.25 M=15 μmol) can be used in each coupling cycle of 2′-O-methyl residues relative to polymer-bound 5′-hydroxyl. A 22-fold excess (40 μL of 0.11 M=4.4 μmol) of deoxy phosphoramidite and a 70-fold excess of S-ethyl tetrazole (40 μL of 0.25 M=10 μmol) can be used in each coupling cycle of deoxy residues relative to polymer-bound 5′-hydroxyl. Average coupling yields on the 394 Applied Biosystems, Inc. synthesizer, determined by colorimetric quantitation of the trityl fractions, are typically 97.5-99%. Other oligonucleotide synthesis reagents for the 394 Applied Biosystems, Inc. synthesizer include the following: detritylation solution is 3% TCA in methylene chloride (ABI); capping is performed with 16% N-methyl imidazole in THF (ABI) and 10% acetic anhydride/10% 2,6-lutidine in THF (ABI); and oxidation solution is 16.9 mM 12, 49 mM pyridine, 9% water in THF (PerSeptive Biosystems, Inc.). Burdick & Jackson Synthesis Grade acetonitrile is used directly from the reagent bottle. S-Ethyltetrazole solution (0.25 M in acetonitrile) is made up from the solid obtained from American International Chemical, Inc. Alternately, for the introduction of phosphorothioate linkages, Beaucage reagent (3H-1,2-Benzodithiol-3-one 1,1-dioxide, 0.05 M in acetonitrile) is used.

[0447] Deprotection of the DNA-based oligonucleotides is performed as follows: the polymer-bound trityl-on oligoribonucleotide is transferred to a 4 mL glass screw top vial and suspended in a solution of 40% aqueous methylamine (1 mL) at 65° C. for 10 minutes. After cooling to −20° C., the supernatant is removed from the polymer support. The support is washed three times with 1.0 mL of EtOH:MeCN:H₂O/3:1:1, vortexed and the supernatant is then added to the first supernatant. The combined supernatants, containing the oligoribonucleotide, are dried to a white powder.

[0448] The method of synthesis used for RNA including certain siNA molecules of the invention follows the procedure as described in Usman et al., 1987, J. Am. Chem. Soc., 109, 7845; Scaringe et al., 1990, Nucleic Acids Res., 18, 5433; and Wincott et al., 1995, Nucleic Acids Res. 23, 2677-2684 Wincott et al., 1997, Methods Mol. Bio., 74, 59, and makes use of common nucleic acid protecting and coupling groups, such as dimethoxytrityl at the 5′-end, and phosphoramidites at the 3′-end. In a non-limiting example, small scale syntheses are conducted on a 394 Applied Biosystems, Inc. synthesizer using a 0.2 μmol scale protocol with a 7.5 min coupling step for alkylsilyl protected nucleotides and a 2.5 min coupling step for 2′-O-methylated nucleotides. Table V outlines the amounts and the contact times of the reagents used in the synthesis cycle. Alternatively, syntheses at the 0.2 μmol scale can be done on a 96-well plate synthesizer, such as the instrument produced by Protogene (Palo Alto, Calif.) with minimal modification to the cycle. A 33-fold excess (60 μL of 0.11 M=6.6 μmol) of 2′-O-methyl phosphoramidite and a 75-fold excess of S-ethyl tetrazole (60 μL of 0.25 M=15 μmol) can be used in each coupling cycle of 2′-O-methyl residues relative to polymer-bound 5′-hydroxyl. A 66-fold excess (120 μL of 0.11 M=13.2 μmol) of alkylsilyl(ribo) protected phosphoramidite and a 150-fold excess of S-ethyl tetrazole (120 μL of 0.25 M=30 μmol) can be used in each coupling cycle of ribo residues relative to polymer-bound 5′-hydroxyl. Average coupling yields on the 394 Applied Biosystems, Inc. synthesizer, determined by colorimetric quantitation of the trityl fractions, are typically 97.5-99%. Other oligonucleotide synthesis reagents for the 394 Applied Biosystems, Inc. synthesizer include the following: detritylation solution is 3% TCA in methylene chloride (ABI); capping is performed with 16% N-methyl imidazole in THF (ABI) and 10% acetic anhydride/10% 2,6-lutidine in THF (ABI); oxidation solution is 16.9 mM 12, 49 mM pyridine, 9% water in THF (PerSeptive Biosystems, Inc.). Burdick & Jackson Synthesis Grade acetonitrile is used directly from the reagent bottle. S-Ethyltetrazole solution (0.25 M in acetonitrile) is made up from the solid obtained from American International Chemical, Inc. Alternately, for the introduction of phosphorothioate linkages, Beaucage reagent (3H-1,2-Benzodithiol-3-one 1,1-dioxide 0.05 M in acetonitrile) is used.

[0449] Deprotection of the RNA is performed using either a two-pot or one-pot protocol. For the two-pot protocol, the polymer-bound trityl-on oligoribonucleotide is transferred to a 4 mL glass screw top vial and suspended in a solution of 40% aq. methylamine (1 mL) at 65° C. for 10 min. After cooling to −20° C., the supernatant is removed from the polymer support. The support is washed three times with 1.0 mL of EtOH:MeCN:H₂O/3:1:1, vortexed and the supernatant is then added to the first supernatant. The combined supernatants, containing the oligoribonucleotide, are dried to a white powder. The base deprotected oligoribonucleotide is resuspended in anhydrous TEA/HF/NMP solution (300 μL of a solution of 1.5 mL N-methylpyrrolidinone, 750 μL TEA and 1 mL TEA-3HF to provide a 1.4 M HF concentration) and heated to 65° C. After 1.5 h, the oligomer is quenched with 1.5 M NH₄HCO₃.

[0450] Alternatively, for the one-pot protocol, the polymer-bound trityl-on oligoribonucleotide is transferred to a 4 mL glass screw top vial and suspended in a solution of 33% ethanolic methylamine/DMSO:1/1 (0.8 mL) at 65° C. for 15 minutes. The vial is brought to room temperature TEA.3HF (0.1 mL) is added and the vial is heated at 65° C. for 15 minutes. The sample is cooled at −20° C. and then quenched with 1.5 M NH₄HCO₃.

[0451] For purification of the trityl-on oligomers, the quenched NH₄HCO₃ solution is loaded onto a C-18 containing cartridge that had been prewashed with acetonitrile followed by 50 mM TEAA. After washing the loaded cartridge with water, the RNA is detritylated with 0.5% TFA for 13 minutes. The cartridge is then washed again with water, salt exchanged with 1 M NaCl and washed with water again. The oligonucleotide is then eluted with 30% acetonitrile.

[0452] The average stepwise coupling yields are typically >98% (Wincott et al, 1995 Nucleic Acids Res. 23, 2677-2684). Those of ordinary skill in the art will recognize that the scale of synthesis can be adapted to be larger or smaller than the example described above including but not limited to 96-well format.

[0453] Alternatively, the nucleic acid molecules of the present invention can be synthesized separately and joined together post-synthetically, for example, by ligation (Moore et al, 1992, Science 256, 9923; Draper et al, International PCT publication No. WO 93/23569; Shabarova et al, 1991, Nucleic Acids Research 19, 4247; Bellon et al, 1997, Nucleosides & Nucleotides, 16, 951; Bellon et al, 1997, Bioconjugate Chem. 8, 204), or by hybridization following synthesis and/or deprotection.

[0454] The siNA molecules of the invention can also be synthesized via a tandem synthesis methodology as described in Example 1 herein, wherein both siNA strands are synthesized as a single contiguous oligonucleotide fragment or strand separated by a cleavable linker which is subsequently cleaved to provide separate siNA fragments or strands that hybridize and permit purification of the siNA duplex. The linker can be a polynucleotide linker or a non-nucleotide linker. The tandem synthesis of siNA as described herein can be readily adapted to both multiwell/multiplate synthesis platforms such as 96 well or similarly larger multi-well platforms. The tandem synthesis of siNA as described herein can also be readily adapted to large scale synthesis platforms employing batch reactors, synthesis columns and the like.

[0455] A siNA molecule can also be assembled from two distinct nucleic acid strands or fragments wherein one fragment includes the sense region and the second fragment includes the antisense region of the RNA molecule.

[0456] The nucleic acid molecules of the present invention can be modified extensively to enhance stability by modification with nuclease resistant groups, for example, 2′-amino, 2′-C-allyl, 2′-fluoro, 2′-O-methyl, 2′-H (for a review see Usman and Cedergren, 1992, TIBS 17, 34; Usman et al., 1994, Nucleic Acids Symp. Ser. 31, 163). siNA constructs can be purified by gel electrophoresis using general methods or can be purified by high pressure liquid chromatography (HPLC; see Wincott et al., supra, the totality of which is hereby incorporated herein by reference) and re-suspended in water.

[0457] In another aspect of the invention, siNA molecules of the invention are expressed from transcription units inserted into DNA or RNA vectors. The recombinant vectors can be DNA plasmids or viral vectors. siNA expressing viral vectors can be constructed based on, but not limited to, adeno-associated virus, retrovirus, adenovirus, or alphavirus. The recombinant vectors capable of expressing the siNA molecules can be delivered as described herein, and persist in target cells. Alternatively, viral vectors can be used that provide for transient expression of siNA molecules.

### Optimizing Activity of the Nucleic Acid Molecule of the Invention.

[0458] Chemically synthesizing nucleic acid molecules with modifications (base, sugar and/or phosphate) can prevent their degradation by serum ribonucleases, which can increase their potency (see e.g., Eckstein et al., International Publication No. WO 92/07065; Perrault et al., 1990 Nature 344, 565; Pieken et al., 1991, Science 253, 314; Usman and Cedergren, 1992, Trends in Biochem. Sci. 17, 334; Usman et al., International Publication No. WO 93/15187; and Rossi et al., International Publication No. WO 91/03162; Sproat, U.S. Pat. No. 5,334,711; Gold et al., U.S. Pat. No. 6,300,074; and Burgin et al., supra; all of which are incorporated by reference herein). All of the above references describe various chemical modifications that can be made to the base, phosphate and/or sugar moieties of the nucleic acid molecules described herein. Modifications that enhance their efficacy in cells, and removal of bases from nucleic acid molecules to shorten oligonucleotide synthesis times and reduce chemical requirements are desired.

[0459] There are several examples in the art describing sugar, base and phosphate modifications that can be introduced into nucleic acid molecules with significant enhancement in their nuclease stability and efficacy. For example, oligonucleotides are modified to enhance stability and/or enhance biological activity by modification with nuclease resistant groups, for example, 2′-amino, 2′-C-allyl, 2′-fluoro, 2′-O-methyl, 2′-O-allyl, 2′-H, nucleotide base modifications (for a review see Usman and Cedergren, 1992, TIBS. 17, 34; Usman et al., 1994, Nucleic Acids Symp. Ser. 31, 163; Burgin et al., 1996, Biochemistry, 35, 14090). Sugar modification of nucleic acid molecules have been extensively described in the art (see Eckstein et al., International Publication PCT No. WO 92/07065; Perrault et al. Nature, 1990, 344, 565-568; Pieken et al. Science, 1991, 253, 314-317; Usman and Cedergren, Trends in Biochem. Sci., 1992, 17, 334-339; Usman et al. International Publication PCT No. WO 93/15187; Sproat, U.S. Pat. No. 5,334,711 and Beigelman et al., 1995, J. Biol. Chem., 270, 25702; Beigelman et al., International PCT publication No. WO 97/26270; Beigelman et al., U.S. Pat. No. 5,716,824; Usman et al., U.S. Pat. No. 5,627,053; Woolf et al., International PCT Publication No. WO 98/13526; Thompson et al., U.S. Ser. No. 60/082,404 which was filed on Apr. 20, 1998; Karpeisky et al., 1998, Tetrahedron Lett., 39, 1131; Earnshaw and Gait, 1998, Biopolymers (Nucleic Acid Sciences), 48, 39-55; Verma and Eckstein, 1998, Annu. Rev. Biochem., 67, 99-134; and Burlina et al., 1997, Bioorg. Med. Chem., 5, 1999-2010; all of the references are hereby incorporated in their totality by reference herein). Such publications describe general methods and strategies to determine the location of incorporation of sugar, base and/or phosphate modifications and the like into nucleic acid molecules without modulating catalysis, and are incorporated by reference herein. In view of such teachings, similar modifications can be used as described herein to modify the siNA nucleic acid molecules of the instant invention so long as the ability of siNA to promote RNAi is cells is not significantly inhibited.

[0460] While chemical modification of oligonucleotide internucleotide linkages with phosphorothioate, phosphorodithioate, and/or 5′-methylphosphonate linkages improves stability, excessive modifications can cause some toxicity or decreased activity. Therefore, when designing nucleic acid molecules, the amount of these internucleotide linkages should be minimized. The reduction in the concentration of these linkages should lower toxicity, resulting in increased efficacy and higher specificity of these molecules.

[0461] Short interfering nucleic acid (siNA) molecules having chemical modifications that maintain or enhance activity are provided. Such a nucleic acid is also generally more resistant to nucleases than an unmodified nucleic acid. Accordingly, the in vitro and/or in viva activity should not be significantly lowered. In cases in which modulation is the goal, therapeutic nucleic acid molecules delivered exogenously should optimally be stable within cells until translation of the target RNA has been modulated long enough to reduce the levels of the undesirable protein. This period of time varies between hours to days depending upon the disease state. Improvements in the chemical synthesis of RNA and DNA (Wincott et al, 1995, Nucleic Acids Res. 23, 2677; Caruthers et al., 1992, Methods in Enzymology 211, 3-19 (incorporated by reference herein)) have expanded the ability to modify nucleic acid molecules by introducing nucleotide modifications to enhance their nuclease stability, as described above.

[0462] In one embodiment, nucleic acid molecules of the invention include one or more (e.g., about 1, 2, 3, 4, 5, 6, 7, 8, 9, 10, or more) G-clamp nucleotides. A G-clamp nucleotide is a modified cytosine analog wherein the modifications confer the ability to hydrogen bond both Watson-Crick and Hoogsteen faces of a complementary guanine within a duplex, see for example Lin and Matteucci, 1998, J. Am. Chem. Soc., 120, 8531-8532. A single G-clamp analog substitution within an oligonucleotide can result in substantially enhanced helical thermal stability and mismatch discrimination when hybridized to complementary oligonucleotides. The inclusion of such nucleotides in nucleic acid molecules of the invention results in both enhanced affinity and specificity to nucleic acid targets, complementary sequences, or template strands. In another embodiment, nucleic acid molecules of the invention include one or more (e.g., about 1, 2, 3, 4, 5, 6, 7, 8, 9, 10, or more) LNA “locked nucleic acid” nucleotides such as a 2′,4′-C methylene bicyclo nucleotide (see for example Wengel et al, International PCT Publication No. WO 00/66604 and WO 99/14226).

[0463] In another embodiment, the invention features conjugates and/or complexes of siNA molecules of the invention. Such conjugates and/or complexes can be used to facilitate delivery of siNA molecules into a biological system, such as a cell. The conjugates and complexes provided by the instant invention can impart therapeutic activity by transferring therapeutic compounds across cellular membranes, altering the pharmacokinetics, and/or modulating the localization of nucleic acid molecules of the invention. The present invention encompasses the design and synthesis of novel conjugates and complexes for the delivery of molecules, including, but not limited to, small molecules, lipids, cholesterol, phospholipids, nucleosides, nucleotides, nucleic acids, antibodies, toxins, negatively charged polymers and other polymers, for example proteins, peptides, hormones, carbohydrates, polyethylene glycols, or polyamines, across cellular membranes. In general, the transporters described are designed to be used either individually or as part of a multi-component system, with or without degradable linkers. These compounds are expected to improve delivery and/or localization of nucleic acid molecules of the invention into a number of cell types originating from different tissues, in the presence or absence of serum (see Sullenger and Cech, U.S. Pat. No. 5,854,038). Conjugates of the molecules described herein can be attached to biologically active molecules via linkers that are biodegradable, such as biodegradable nucleic acid linker molecules.

[0464] The term “biodegradable linker” as used herein, refers to a nucleic acid or non-nucleic acid linker molecule that is designed as a biodegradable linker to connect one molecule to another molecule, for example, a biologically active molecule to a siNA molecule of the invention or the sense and antisense strands of a siNA molecule of the invention. The biodegradable linker is designed such that its stability can be modulated for a particular purpose, such as delivery to a particular tissue or cell type. The stability of a nucleic acid-based biodegradable linker molecule can be modulated by using various chemistries, for example combinations of ribonucleotides, deoxyribonucleotides, and chemically-modified nucleotides, such as 2′-O-methyl, 2′-fluoro, 2′-amino, 2′-O-amino, 2′-C-allyl, 2′-O-allyl, and other 2′-modified or base modified nucleotides. The biodegradable nucleic acid linker molecule can be a dimer, trimer, tetramer or longer nucleic acid molecule, for example, an oligonucleotide of about 2, 3, 4, 5, 6, 7, 8, 9, 10, 11, 12, 13, 14, 15, 16, 17, 18, 19, or 20 nucleotides in length, or can comprise a single nucleotide with a phosphorus-based linkage, for example, a phosphoramidate or phosphodiester linkage. The biodegradable nucleic acid linker molecule can also comprise nucleic acid backbone, nucleic acid sugar, or nucleic acid base modifications.

[0465] The term “biodegradable” as used herein, refers to degradation in a biological system, for example, enzymatic degradation or chemical degradation.

[0466] The term “biologically active molecule” as used herein refers to compounds or molecules that are capable of eliciting or modifying a biological response in a system. Non-limiting examples of biologically active siNA molecules either alone or in combination with other molecules contemplated by the instant invention include therapeutically active molecules such as antibodies, cholesterol, hormones, antivirals, peptides, proteins, chemotherapeutics, small molecules, vitamins, co-factors, nucleosides, nucleotides, oligonucleotides, enzymatic nucleic acids, antisense nucleic acids, triplex forming oligonucleotides, 2,5-A chimeras, siNA, dsRNA, allozymes, aptamers, decoys and analogs thereof. Biologically active molecules of the invention also include molecules capable of modulating the pharmacokinetics and/or pharmacodynamics of other biologically active molecules, for example, lipids and polymers such as polyamines, polyamides, polyethylene glycol and other polyethers.

[0467] The term “phospholipid” as used herein, refers to a hydrophobic molecule comprising at least one phosphorus group. For example, a phospholipid can comprise a phosphorus-containing group and saturated or unsaturated alkyl group, optionally substituted with OH, COOH, oxo, amine, or substituted or unsubstituted aryl groups.

[0468] Therapeutic nucleic acid molecules (e.g., siNA molecules) delivered exogenously optimally are stable within cells until reverse transcription of the RNA has been modulated long enough to reduce the levels of the RNA transcript. The nucleic acid molecules are resistant to nucleases in order to function as effective intracellular therapeutic agents. Improvements in the chemical synthesis of nucleic acid molecules described in the instant invention and in the art have expanded the ability to modify nucleic acid molecules by introducing nucleotide modifications to enhance their nuclease stability as described above.

[0469] In yet another embodiment, siNA molecules having chemical modifications that maintain or enhance enzymatic activity of proteins involved in RNAi are provided. Such nucleic acids are also generally more resistant to nucleases than unmodified nucleic acids. Thus, in vitro and/or in vivo the activity should not be significantly lowered.

[0470] Use of the nucleic acid-based molecules of the invention will lead to better treatments by affording the possibility of combination therapies (e.g., multiple siNA molecules targeted to different genes; nucleic acid molecules coupled with known small molecule modulators; or intermittent treatment with combinations of molecules, including different motifs and/or other chemical or biological molecules). The treatment of subjects with siNA molecules can also include combinations of different types of nucleic acid molecules, such as enzymatic nucleic acid molecules (ribozymes), allozymes, antisense, 2,5-A oligoadenylate, decoys, and aptamers.

[0471] In another aspect a siNA molecule of the invention comprises one or more 5′ and/or a 3′-cap structure, for example, on only the sense siNA strand, the antisense siNA strand, or both siNA strands.

[0472] By “cap structure” is meant chemical modifications, which have been incorporated at either terminus of the oligonucleotide (see, for example, Adamic et al., U.S. Pat. No. 5,998,203, incorporated by reference herein). These terminal modifications protect the nucleic acid molecule from exonuclease degradation, and may help in delivery and/or localization within a cell. The cap may be present at the 5′-terminus (5′-cap) or at the 3′-terminal (3′-cap) or may be present on both termini. In non-limiting examples, the 5′-cap includes, but is not limited to, glyceryl, inverted deoxy abasic residue (moiety); 4′,5′-methylene nucleotide; 1-(beta-D-erythrofuranosyl) nucleotide, 4′-thio nucleotide; carbocyclic nucleotide; 1,5-anhydrohexitol nucleotide; L-nucleotides; alpha-nucleotides; modified base nucleotide; phosphorodithioate linkage; threo-pentofuranosyl nucleotide; acyclic 3′,4′-seco nucleotide; acyclic 3,4-dihydroxybutyl nucleotide; acyclic 3,5-dihydroxypentyl nucleotide, 3′-3′-inverted nucleotide moiety; 3′-3′-inverted abasic moiety; 3′-2′-inverted nucleotide moiety; 3′-2′-inverted abasic moiety; 1,4-butanediol phosphate; 3′-phosphoramidate; hexylphosphate; aminohexyl phosphate; 3′-phosphate; 3′-phosphorothioate; phosphorodithioate; or bridging or non-bridging methylphosphonate moiety. Non-limiting examples of cap moieties are shown in FIG. 10.

[0473] Non-limiting examples of the 3′-cap include, but are not limited to, glyceryl, inverted deoxy abasic residue (moiety), 4′,5′-methylene nucleotide; 1-(beta-D-erythrofuranosyl) nucleotide; 4′-thio nucleotide, carbocyclic nucleotide; 5′-amino-alkyl phosphate; 1,3-diamino-2-propyl phosphate; 3-aminopropyl phosphate; 6-aminohexyl phosphate; 1,2-aminododecyl phosphate; hydroxypropyl phosphate; 1,5-anhydrohexitol nucleotide; L-nucleotide; alpha-nucleotide; modified base nucleotide; phosphorodithioate; threo-pentofuranosyl nucleotide; acyclic 3′,4′-seco nucleotide; 3,4-dihydroxybutyl nucleotide; 3,5-dihydroxypentyl nucleotide, 5′-5′-inverted nucleotide moiety; 5′-5′-inverted abasic moiety; 5′-phosphoramidate; 5′-phosphorothioate; 1,4-butanediol phosphate; 5′-amino; bridging and/or non-bridging 5′-phosphoramidate, phosphorothioate and/or phosphorodithioate, bridging or non bridging methylphosphonate and 5′-mercapto moieties (for more details see Beaucage and Iyer, 1993, Tetrahedron 49, 1925; incorporated by reference herein).

[0474] By the term “non-nucleotide” is meant any group or compound which can be incorporated into a nucleic acid chain in the place of one or more nucleotide units, including either sugar and/or phosphate substitutions, and allows the remaining bases to exhibit their enzymatic activity. The group or compound is abasic in that it does not contain a commonly recognized nucleotide base, such as adenosine, guanine, cytosine, uracil or thymine and therefore lacks a base at the 1′-position.

[0475] An “alkyl” group refers to a saturated aliphatic hydrocarbon, including straight-chain, branched-chain, and cyclic alkyl groups. Preferably, the alkyl group has 1 to 12 carbons. More preferably, it is a lower alkyl of from 1 to 7 carbons, more preferably 1 to 4 carbons. The alkyl group can be substituted or unsubstituted. When substituted the substituted group(s) is preferably, hydroxyl, cyano, alkoxy, ═O, ═S, NO₂ or N(CH₃)₂, amino, or SH. The term also includes alkenyl groups that are unsaturated hydrocarbon groups containing at least one carbon-carbon double bond, including straight-chain, branched-chain, and cyclic groups. Preferably, the alkenyl group has 1 to 12 carbons. More preferably, it is a lower alkenyl of from 1 to 7 carbons, more preferably 1 to 4 carbons. The alkenyl group may be substituted or unsubstituted. When substituted the substituted group(s) is preferably, hydroxyl, cyano, alkoxy, —O, ═S, NO₂, halogen, N(CH₃)₂, amino, or SH. The term “alkyl” also includes alkynyl groups that have an unsaturated hydrocarbon group containing at least one carbon-carbon triple bond, including straight-chain, branched-chain, and cyclic groups. Preferably, the alkynyl group has 1 to 12 carbons. More preferably, it is a lower alkynyl of from 1 to 7 carbons, more preferably 1 to 4 carbons. The alkynyl group may be substituted or unsubstituted. When substituted the substituted group(s) is preferably, hydroxyl, cyano, alkoxy, ═O, ═S, NO₂ or N(CH₃)₂, amino or SH.

[0476] Such alkyl groups can also include aryl, alkylaryl, carbocyclic aryl, heterocyclic aryl, amide and ester groups. An “aryl” group refers, to an aromatic group that has at least one ring having a conjugated pi electron system and includes carbocyclic aryl, heterocyclic aryl and biaryl groups, all of which may be optionally substituted. The preferred substituent(s) of aryl groups are halogen, trihalomethyl, hydroxyl, SH, OH, cyano, alkoxy, alkyl, alkenyl, alkynyl, and amino groups. An “alkylaryl” group refers to an alkyl group (as described above) covalently joined to an aryl group (as described above). Carbocyclic aryl groups are groups wherein the ring atoms on the aromatic ring are all carbon atoms. The carbon atoms are optionally substituted. Heterocyclic aryl groups are groups having from 1 to 3 heteroatoms as ring atoms in the aromatic ring and the remainder of the ring atoms are carbon atoms. Suitable heteroatoms include oxygen, sulfur, and nitrogen, and include furanyl, thienyl, pyridyl, pyrrolyl, N-lower alkyl pyrrolo, pyrimidyl, pyrazinyl, imidazolyl and the like, all optionally substituted. An “amide” refers to an —C(O)—NH—R, where R is either alkyl, aryl, alkylaryl or hydrogen. An “ester” refers to an —C(O)—OR, where R is either alkyl, aryl, alkylaryl or hydrogen.

[0477] By “nucleotide” as used herein is as recognized in the art to include natural bases (standard), and modified bases well known in the art. Such bases are generally located at the 1′ position of a nucleotide sugar moiety. Nucleotides generally comprise a base, sugar and a phosphate group. The nucleotides can be unmodified or modified at the sugar, phosphate and/or base moiety, (also referred to interchangeably as nucleotide analogs, modified nucleotides, non-natural nucleotides, non-standard nucleotides and other; see, for example, Usman and McSwiggen, supra; Eckstein et al., International PCT Publication No. WO 92/07065; Usman et al, International PCT Publication No. WO 93/15187; Uhlman & Peyman, supra, all are hereby incorporated by reference herein). There are several examples of modified nucleic acid bases known in the art as summarized by Limbach et al., 1994, Nucleic Acids Res. 22, 2183. Some of the non-limiting examples of base modifications that can be introduced into nucleic acid molecules include, inosine, purine, pyridin-4-one, pyridin-2-one, phenyl, pseudouracil, 2,4,6-trimethoxy benzene, 3-methyl uracil, dihydrouridine, naphthyl, aminophenyl, 5-alkylcytidines (e.g., 5-methylcytidine), 5-alkyluridines (e.g., ribothymidine), 5-halouridine (e.g., 5-bromouridine) or 6-azapyrimidines or 6-alkylpyrimidines (e.g. 6-methyluridine), propyne, and others (Burgin et al., 1996, Biochemistry, 35, 14090; Uhlman & Peyman, supra). By “modified bases” in this aspect is meant nucleotide bases other than adenine, guanine, cytosine and uracil at 1′ position or their equivalents.

[0478] In one embodiment, the invention features modified siNA molecules, with phosphate backbone modifications comprising one or more phosphorothioate, phosphorodithioate, methylphosphonate, phosphotriester, morpholino, amidate carbamate, carboxymethyl, acetamidate, polyamide, sulfonate, sulfonamide, sulfamate, formacetal, thioformacetal, and/or alkylsilyl, substitutions. For a review of oligonucleotide backbone modifications, see Hunziker and Leumann, 1995, Nucleic Acid Analogues: Synthesis and Properties, in Modern Synthetic Methods, VCH, 331-417, and Mesmaeker et al., 1994, Novel Backbone Replacements for Oligonucleotides, in Carbohydrate Modifications in Antisense Research, ACS, 24-39.

[0479] By “abasic” is meant sugar moieties lacking a nucleobase or having a hydrogen atom (H) or other non-nucleobase chemical groups in place of a nucleobase at the 1′ position of the sugar moiety, see for example Adamic et al., U.S. Pat. No. 5,998,203. In one embodiment, an abasic moiety of the invention is a ribose, deoxyribose, or dideoxyribose sugar.

[0480] By “unmodified nucleoside” is meant one of the bases adenine, cytosine, guanine, thymine, or uracil joined to the 1′ carbon of β-D-ribo-furanose.

[0481] By “modified nucleoside” is meant any nucleotide base which contains a modification in the chemical structure of an unmodified nucleotide base, sugar and/or phosphate. Non-limiting examples of modified nucleotides are shown by Formulae I-VII and/or other modifications described herein.

[0482] In connection with 2′-modified nucleotides as described for the present invention, by “amino” is meant 2′—NH₂ or 2′-O—NH₂, which can be modified or unmodified. Such modified groups are described, for example, in Eckstein et al., U.S. Pat. No. 5,672,695 and Matulic-Adamic et al., U.S. Pat. No. 6,248,878, which are both incorporated by reference in their entireties.

[0483] Various modifications to nucleic acid siNA structure can be made to enhance the utility of these molecules. Such modifications will enhance shelf-life, half-life in vitro, stability, and ease of introduction of such oligonucleotides to the target site, e.g., to enhance penetration of cellular membranes, and confer the ability to recognize and bind to targeted cells.

### Administration of Nucleic Acid Molecules

[0484] A siNA molecule of the invention can be adapted for use to prevent or treat cancer, inflammatory, respiratory, autoimmune, cardiovascular, neurological, and/or proliferative diseases, conditions, disorders, traits and/or conditions described herein or otherwise known in the art to be related to gene expression, and/or any other trait, disease, disorder or condition that is related to or will respond to the levels of interleukin and/or interleukin receptor in a cell or tissue, alone or in combination with other therapies.

[0485] In one embodiment a siNA composition of the invention can comprise a delivery vehicle, including liposomes, for administration to a subject, carriers and diluents and their salts, and/or can be present in pharmaceutically acceptable formulations. Methods for the delivery of nucleic acid molecules are described in Akhtar et al., 1992, Trends Cell Bio., 2, 139; Delivery Strategies for Antisense Oligonucleotide Therapeutics, ed. Akhtar, 1995, Maurer et al., 1999, Mol. Membr. Biol., 16, 129-140; Hofland and Huang, 1999, Handb. Exp. Pharmacol., 137, 165-192; and Lee et al., 2000, ACS Symp. Ser., 752, 184-192, all of which are incorporated herein by reference. Beigelman et al., U.S. Pat. No. 6,395,713 and Sullivan et al., PCT WO 94/02595 further describe the general methods for delivery of nucleic acid molecules. These protocols can be utilized for the delivery of virtually any nucleic acid molecule. Nucleic acid molecules can be administered to cells by a variety of methods known to those of skill in the art, including, but not restricted to, encapsulation in liposomes, by iontophoresis, or by incorporation into other vehicles, such as biodegradable polymers, hydrogels, cyclodextrins (see for example Gonzalez et al., 1999, Bioconjugate Chem., 10, 1068-1074; Wang et al, International PCT publication Nos. WO 03/47518 and WO 03/46185), poly(lactic-co-glycolic)acid (PLGA) and PLCA microspheres (see for example U.S. Pat. No. 6,447,796 and US Patent Application Publication No. US 2002130430), biodegradable nanocapsules, and bioadhesive microspheres, or by proteinaceous vectors (O'Hare and Normand, International PCT Publication No. WO 00/53722). In another embodiment, the nucleic acid molecules of the invention can also be formulated or complexed with polyethyleneimine and derivatives thereof, such as polyethyleneimine-polyethyleneglycol-N-acetylgalactosamine (PEI-PEG-GAL) or polyethyleneimine-polyethyleneglycol-tri-N-acetylgalactosamine (PEI-PEG-triGAL) derivatives. In one embodiment, the nucleic acid molecules of the invention are formulated as described in United States Patent Application Publication No. 20030077829, incorporated by reference herein in its entirety.

[0486] In one embodiment, a siNA molecule of the invention is formulated as a composition described in U.S. Provisional patent application No. 60/678,531 and in related U.S. Provisional patent application No. 60/703,946, filed Jul. 29, 2005, and U.S. Provisional patent application No. 60/737,024, filed Nov. 15, 2005 (Vargeese et al.), all of which are incorporated by reference herein in their entirety. Such siNA formulations are generally referred to as “lipid nucleic acid particles” (LNP).

[0487] In one embodiment, a siNA molecule of the invention is complexed with membrane disruptive agents such as those described in U.S. Patent Application Publication No. 20010007666, incorporated by reference herein in its entirety including the drawings. In another embodiment, the membrane disruptive agent or agents and the siNA molecule are also complexed with a cationic lipid or helper lipid molecule, such as those lipids described in U.S. Pat. No. 6,235,310, incorporated by reference herein in its entirety including the drawings.

[0488] In one embodiment, a siNA molecule of the invention is complexed with delivery systems as described in U.S. Patent Application Publication No. 2003077829 and International PCT Publication Nos. WO 00/03683 and WO 02/087541, all incorporated by reference herein in their entirety including the drawings.

[0489] In one embodiment, the nucleic acid molecules of the invention are administered via pulmonary delivery, such as by inhalation of an aerosol or spray dried formulation administered by an inhalation device or nebulizer, providing rapid local uptake of the nucleic acid molecules into relevant pulmonary tissues. Solid particulate compositions containing respirable dry particles of micronized nucleic acid compositions can be prepared by grinding dried or lyophilized nucleic acid compositions, and then passing the micronized composition through, for example, a 400 mesh screen to break up or separate out large agglomerates. A solid particulate composition comprising the nucleic acid compositions of the invention can optionally contain a dispersant which serves to facilitate the formation of an aerosol as well as other therapeutic compounds. A suitable dispersant is lactose, which can be blended with the nucleic acid compound in any suitable ratio, such as a 1 to 1 ratio by weight.

[0490] Aerosols of liquid particles comprising a nucleic acid composition of the invention can be produced by any suitable means, such as with a nebulizer (see for example U.S. Pat. No. 4,501,729). Nebulizers are commercially available devices which transform solutions or suspensions of an active ingredient into a therapeutic aerosol mist either by means of acceleration of a compressed gas, typically air or oxygen, through a narrow venturi orifice or by means of ultrasonic agitation. Suitable formulations for use in nebulizers comprise the active ingredient in a liquid carrier in an amount of up to 40% w/w preferably less than 20% w/w of the formulation. The carrier is typically water or a dilute aqueous alcoholic solution, preferably made isotonic with body fluids by the addition of, for example, sodium chloride or other suitable salts. Optional additives include preservatives if the formulation is not prepared sterile, for example, methyl hydroxybenzoate, anti-oxidants, flavorings, volatile oils, buffering agents and emulsifiers and other formulation surfactants. The aerosols of solid particles comprising the active composition and surfactant can likewise be produced with any solid particulate aerosol generator. Aerosol generators for administering solid particulate therapeutics to a subject produce particles which are respirable, as explained above, and generate a volume of aerosol containing a predetermined metered dose of a therapeutic composition at a rate suitable for human administration.

[0491] In one embodiment, a solid particulate aerosol generator of the invention is an insufflator. Suitable formulations for administration by insufflation include finely comminuted powders which can be delivered by means of an insufflator. In the insufflator, the powder, e.g., a metered dose thereof effective to carry out the treatments described herein, is contained in capsules or cartridges, typically made of gelatin or plastic, which are either pierced or opened in situ and the powder delivered by air drawn through the device upon inhalation or by means of a manually-operated pump. The powder employed in the insufflator consists either solely of the active ingredient or of a powder blend comprising the active ingredient, a suitable powder diluent, such as lactose, and an optional surfactant. The active ingredient typically comprises from 0.1 to 100 w/w of the formulation. A second type of illustrative aerosol generator comprises a metered dose inhaler. Metered dose inhalers are pressurized aerosol dispensers, typically containing a suspension or solution formulation of the active ingredient in a liquified propellant. During use these devices discharge the formulation through a valve adapted to deliver a metered volume to produce a fine particle spray containing the active ingredient. Suitable propellants include certain chlorofluorocarbon compounds, for example, dichlorodifluoromethane, trichlorofluoromethane, dichlorotetrafluoroethane and mixtures thereof. The formulation can additionally contain one or more co-solvents, for example, ethanol, emulsifiers and other formulation surfactants, such as oleic acid or sorbitan trioleate, anti-oxidants and suitable flavoring agents. Other methods for pulmonary delivery are described in, for example US Patent Application No. 20040037780, and U.S. Pat. Nos. 6,592,904; 6,582,728; 6,565,885, all incorporated by reference herein.

[0492] In one embodiment, the invention features the use of methods to deliver the nucleic acid molecules of the instant invention to the central nervous system and/or peripheral nervous system. Experiments have demonstrated the efficient in vivo uptake of nucleic acids by neurons. As an example of local administration of nucleic acids to nerve cells, Sommer et al., 1998, Antisense Nuc. Acid Drug Dev., 8, 75, describe a study in which a 15 mer phosphorothioate antisense nucleic acid molecule to c-fos is administered to rats via microinjection into the brain. Antisense molecules labeled with tetramethylrhodamine-isothiocyanate (TRITC) or fluorescein isothiocyanate (FITC) were taken up by exclusively by neurons thirty minutes post-injection. A diffuse cytoplasmic staining and nuclear staining was observed in these cells. As an example of systemic administration of nucleic acid to nerve cells, Epa et al., 2000, Antisense Nuc. Acid Drug Dev., 10, 469, describe an in vivo mouse study in which beta-cyclodextrin-adamantane-oligonucleotide conjugates were used to target the p75 neurotrophin receptor in neuronally differentiated PC12 cells. Following a two week course of IP administration, pronounced uptake of p75 neurotrophin receptor antisense was observed in dorsal root ganglion (DRG) cells. In addition, a marked and consistent down-regulation of p75 was observed in DRG neurons. Additional approaches to the targeting of nucleic acid to neurons are described in Broaddus et al., 1998, J. Neurosurg., 88(4), 734; Karle et al., 1997, Eur. J. Pharmocol., 340(2/3), 153; Bannai et al., 1998, Brain Research, 784(1,2), 304; Rajakumar et al., 1997, Synapse, 26(3), 199; Wu-pong et al., 1999, BioPharm, 12(1), 32; Bannai et al., 1998, Brain Res. Protoc., 3(1), 83; Simantov et al., 1996, Neuroscience, 74(1), 39. Nucleic acid molecules of the invention are therefore amenable to delivery to and uptake by cells that express repeat expansion allelic variants for modulation of RE gene expression. The delivery of nucleic acid molecules of the invention, targeting RE is provided by a variety of different strategies. Traditional approaches to CNS delivery that can be used include, but are not limited to, intrathecal and intracerebroventricular administration, implantation of catheters and pumps, direct injection or perfusion at the site of injury or lesion, injection into the brain arterial system, or by chemical or osmotic opening of the blood-brain barrier. Other approaches can include the use of various transport and carrier systems, for example though the use of conjugates and biodegradable polymers. Furthermore, gene therapy approaches, for example as described in Kaplitt et al., U.S. Pat. No. 6,180,613 and Davidson, WO 04/013280, can be used to express nucleic acid molecules in the CNS.

[0493] In one embodiment, nucleic acid molecules of the invention are administered to the central nervous system (CNS) or peripheral nervous system (PNS). Experiments have demonstrated the efficient in vivo uptake of nucleic acids by neurons. As an example of local administration of nucleic acids to nerve cells, Sommer et al., 1998, Antisense Nuc. Acid Drug Dev., 8, 75, describe a study in which a 15 mer phosphorothioate antisense nucleic acid molecule to c-fos is administered to rats via microinjection into the brain. Antisense molecules labeled with tetramethylrhodamine-isothiocyanate (TRITC) or fluorescein isothiocyanate (FITC) were taken up by exclusively by neurons thirty minutes post-injection. A diffuse cytoplasmic staining and nuclear staining was observed in these cells. As an example of systemic administration of nucleic acid to nerve cells, Epa et al, 2000, Antisense Nuc. Acid Drug Dev., 10, 469, describe an in vivo mouse study in which beta-cyclodextrin-adamantane-oligonucleotide conjugates were used to target the p75 neurotrophin receptor in neuronally differentiated PC12 cells. Following a two week course of IP administration, pronounced uptake of p75 neurotrophin receptor antisense was observed in dorsal root ganglion (DRG) cells. In addition, a marked and consistent down-regulation of p75 was observed in DRG neurons. Additional approaches to the targeting of nucleic acid to neurons are described in Broaddus et al., 1998, J. Neurosurg., 88(4), 734; Karle et al., 1997, Eur. J. Pharmocol., 340(2/3), 153; Bannai et al., 1998, Brain Research, 784(1,2), 304; Rajakumar et al., 1997, Synapse, 26(3), 199; Wu-pong et al., 1999, BioPharm, 12(1), 32; Bannai et al., 1998, Brain Res. Protoc., 3(1), 83; Simantov et al., 1996, Neuroscience, 74(1), 39. Nucleic acid molecules of the invention are therefore amenable to delivery to and uptake by cells in the CNS and/or PNS.

[0494] The delivery of nucleic acid molecules of the invention to the CNS is provided by a variety of different strategies. Traditional approaches to CNS delivery that can be used include, but are not limited to, intrathecal and intracerebroventricular administration, implantation of catheters and pumps, direct injection or perfusion at the site of injury or lesion, injection into the brain arterial system, or by chemical or osmotic opening of the blood-brain barrier. Other approaches can include the use of various transport and carrier systems, for example though the use of conjugates and biodegradable polymers. Furthermore, gene therapy approaches, for example as described in Kaplitt et al., U.S. Pat. No. 6,180,613 and Davidson, WO 04/013280, can be used to express nucleic acid molecules in the CNS.

[0495] In one embodiment, a siNA molecule of the invention is administered iontophoretically, for example to a particular organ or compartment (e.g., lung, nasopharynx, skin, follicle, the eye, back of the eye, heart, liver, kidney, bladder, prostate, tumor, CNS etc.). Non-limiting examples of iontophoretic delivery are described in, for example, WO 03/043689 and WO 03/030989, which are incorporated by reference in their entireties herein.

[0496] In one embodiment, the siNA molecules of the invention and formulations or compositions thereof are administered directly or topically (e.g., locally) to the dermis or follicles as is generally known in the art (see for example Brand, 2001, Curr. Opin. Mol. Ther., 3, 244-8; Regnier et al., 1998, J. Drug Target, 5, 275-89; Kanikkannan, 2002, BioDrugs, 16, 339-47; Wraight et al., 2001, Pharmacol. Ther., 90, 89-104; and Preat and Dujardin, 2001, STP PharmaSciences, 11, 57-68; and Vogt et al., 2003, Hautarzt. 54, 692-8). In one embodiment, the siNA molecules of the invention and formulations or compositions thereof are administered directly or topically using a hydroalcoholic gel formulation comprising an alcohol (e.g., ethanol or isopropanol), water, and optionally including additional agents such isopropyl myristate and carbomer 980.

[0497] In one embodiment, delivery systems of the invention include, for example, aqueous and nonaqueous gels, creams, multiple emulsions, microemulsions, liposomes, ointments, aqueous and nonaqueous solutions, lotions, aerosols, hydrocarbon bases and powders, and can contain excipients such as solubilizers, permeation enhancers (e.g., fatty acids, fatty acid esters, fatty alcohols and amino acids), and hydrophilic polymers (e.g., polycarbophil and polyvinylpyrolidone). In one embodiment, the pharmaceutically acceptable carrier is a liposome or a transdermal enhancer. Examples of liposomes which can be used in this invention include the following: (1) CellFectin, 1:1.5 (M/M) liposome formulation of the cationic lipid N,NI,NII,NIII-tetramethyl-N,NI,NII,NIII-tetrapalmit-y-spermine and dioleoyl phosphatidylethanolamine (DOPE) (GIBCO BRL); (2) Cytofectin GSV, 2:1 (M/M) liposome formulation of a cationic lipid and DOPE (Glen Research); (3) DOTAP (N-[1-(2,3-dioleoyloxy)-N,N,N-tri-methyl-ammoniummethylsulfate) (Boehringer Manheim); and (4) Lipofectamine, 3:1 (M/M) liposome formulation of the polycationic lipid DOSPA and the neutral lipid DOPE (GIBCO BRL).

[0498] In one embodiment, delivery systems of the invention include patches, tablets, suppositories, pessaries, gels and creams, and can contain excipients such as solubilizers and enhancers (e.g., propylene glycol, bile salts and amino acids), and other vehicles (e.g., polyethylene glycol, fatty acid esters and derivatives, and hydrophilic polymers such as hydroxypropylmethylcellulose and hyaluronic acid).

[0499] In one embodiment, a siNA molecule of the invention is administered iontophoretically, for example to the dermis or to other relevant tissues. Non-limiting examples of iontophoretic delivery are described in, for example, WO 03/043689 and WO 03/030989, which are incorporated by reference in their entireties herein.

[0500] In one embodiment, siNA molecules of the invention are formulated or complexed with polyethylenimine (e.g., linear or branched PEI) and/or polyethylenimine derivatives, including for example grafted PEIs such as galactose PEI, cholesterol PEI, antibody derivatized PEI, and polyethylene glycol PEI (PEG-PEI) derivatives thereof (see for example Ogris et al., 2001, AAPA Pharm Sci, 3, 1-11; Furgeson et al., 2003, Bioconjugate Chem., 14, 840-847; Kuiath et al., 2002, Pharmaceutical Research, 19, 810-817; Choi et al., 2001, Bull. Korean Chem. Soc., 22, 46-52; Bettinger et al., 1999, Bioconjugate Chem., 10, 558-561; Peterson et al., 2002, Bioconjugate Chem., 13, 845-854; Erbacher et al., 1999, Journal of Gene Medicine Preprint, 1, 1-18; Godbey et al., 1999., PNAS USA, 96, 5177-5181; Godbey et al., 1999, Journal of Controlled Release, 60, 149-160; Diebold et al., 1999, Journal of Biological Chemistry, 274, 19087-19094; Thomas and Klibanov, 2002, PNAS USA, 99, 14640-14645; and Sagara, U.S. Pat. No. 6,586,524, incorporated by reference herein.

[0501] In one embodiment, a siNA molecule of the invention comprises a bioconjugate, for example a nucleic acid conjugate as described in Vargeese et al., U.S. Ser. No. 10/427,160, filed Apr. 30, 2003; U.S. Pat. No. 6,528,631; U.S. Pat. No. 6,335,434; U.S. Pat. No. 6,235,886; U.S. Pat. No. 6,153,737; U.S. Pat. No. 5,214,136; U.S. Pat. No. 5,138,045, all incorporated by reference herein.

[0502] Thus, the invention features a pharmaceutical composition comprising one or more nucleic acid(s) of the invention in an acceptable carrier, such as a stabilizer, buffer, and the like. The polynucleotides of the invention can be administered (e.g., RNA, DNA or protein) and introduced to a subject by any standard means, with or without stabilizers, buffers, and the like, to form a pharmaceutical composition. When it is desired to use a liposome delivery mechanism, standard protocols for formation of liposomes can be followed. The compositions of the present invention can also be formulated and used as creams, gels, sprays, oils and other suitable compositions for topical, dermal, or transdermal administration as is known in the art.

[0503] The present invention also includes pharmaceutically acceptable formulations of the compounds described. These formulations include salts of the above compounds, e.g., acid addition salts, for example, salts of hydrochloric, hydrobromic, acetic acid, and benzene sulfonic acid.

[0504] A pharmacological composition or formulation refers to a composition or formulation in a form suitable for administration, e.g., systemic or local administration, into a cell or subject, including for example a human. Suitable forms, in part, depend upon the use or the route of entry, for example oral, transdermal, or by injection. Such forms should not prevent the composition or formulation from reaching a target cell (i.e., a cell to which the negatively charged nucleic acid is desirable for delivery). For example, pharmacological compositions injected into the blood stream should be soluble. Other factors are known in the art, and include considerations such as toxicity and forms that prevent the composition or formulation from exerting its effect.

[0505] In one embodiment, siNA molecules of the invention are administered to a subject by systemic administration in a pharmaceutically acceptable composition or formulation. By “systemic administration” is meant in vivo systemic absorption or accumulation of drugs in the blood stream followed by distribution throughout the entire body. Administration routes that lead to systemic absorption include, without limitation: intravenous, subcutaneous, portal vein, intraperitoneal, inhalation, nebulization, oral, intrapulmonary and intramuscular. Each of these administration routes exposes the siNA molecules of the invention to an accessible diseased tissue. The rate of entry of a drug into the circulation has been shown to be a function of molecular weight or size. The use of a liposome or other drug carrier comprising the compounds of the instant invention can potentially localize the drug, for example, in certain tissue types, such as the tissues of the reticular endothelial system (RES). A liposome formulation that can facilitate the association of drug with the surface of cells, such as, lymphocytes and macrophages is also useful. This approach can provide enhanced delivery of the drug to target cells by taking advantage of the specificity of macrophage and lymphocyte immune recognition of abnormal cells.

[0506] By “pharmaceutically acceptable formulation” or “pharmaceutically acceptable composition” is meant, a composition or formulation that allows for the effective distribution of the nucleic acid molecules of the instant invention in the physical location most suitable for their desired activity. Non-limiting examples of agents suitable for formulation with the nucleic acid molecules of the instant invention include: P-glycoprotein inhibitors (such as Pluronic P85); biodegradable polymers, such as poly (DL-lactide-coglycolide) microspheres for sustained release delivery (Emerich, D F et al, 1999, Cell Transplant, 8, 47-58); and loaded nanoparticles, such as those made of polybutylcyanoacrylate. Other non-limiting examples of delivery strategies for the nucleic acid molecules of the instant invention include material described in Boado et al., 1998, J. Pharm. Sci., 87, 1308-1315; Tyler et al., 1999, FEBS Lett., 421, 280-284; Pardridge et al., 1995, PNAS USA., 92, 5592-5596; Boado, 1995, Adv. Drug Delivery Rev., 15, 73-107; Aldrian-Herrada et al., 1998, Nucleic Acids Res., 26, 4910-4916; and Tyler et al., 1999, PNAS USA., 96, 7053-7058.

[0507] The invention also features the use of a composition comprising surface-modified liposomes containing poly(ethylene glycol) lipids (PEG-modified, or long-circulating liposomes or stealth liposomes) and nucleic acid molecules of the invention. These formulations offer a method for increasing the accumulation of drugs (e.g., siNA) in target tissues. This class of drug carriers resists opsonization and elimination by the mononuclear phagocytic system (MPS or RES), thereby enabling longer blood circulation times and enhanced tissue exposure for the encapsulated drug (Lasic et al. Chem. Rev. 1995, 95, 2601-2627; Ishiwata et al., Chem. Pharm. Bull. 1995, 43, 1005-1011). Such liposomes have been shown to accumulate selectively in tumors, presumably by extravasation and capture in the neovascularized target tissues (Lasic et al., Science 1995, 267, 1275-1276; Oku et al., 1995, Biochem. Biophys. Acta, 1238, 86-90). The long-circulating liposomes enhance the pharmacokinetics and pharmacodynamics of DNA and RNA, particularly compared to conventional cationic liposomes which are known to accumulate in tissues of the MPS (Liu et al., J. Biol. Chem. 1995, 42, 24864-24870; Choi et al., International PCT Publication No. WO 96/10391; Ansell et al., International PCT Publication No. WO 96/10390; Holland et al., International PCT Publication No. WO 96/10392). Long-circulating liposomes are also likely to protect drugs from nuclease degradation to a greater extent compared to cationic liposomes, based on their ability to avoid accumulation in metabolically aggressive MPS tissues such as the liver and spleen.

[0508] The present invention also includes compositions prepared for storage or administration that include a pharmaceutically effective amount of the desired compounds in a pharmaceutically acceptable carrier or diluent. Acceptable carriers or diluents for therapeutic use are well known in the pharmaceutical art, and are described, for example, in Remington's Pharmaceutical Sciences, Mack Publishing Co. (A. R. Gennaro edit. 1985), hereby incorporated by reference herein. For example, preservatives, stabilizers, dyes and flavoring agents can be provided. These include sodium benzoate, sorbic acid and esters of p-hydroxybenzoic acid. In addition, antioxidants and suspending agents can be used.

[0509] A pharmaceutically effective dose is that dose required to prevent, inhibit the occurrence, or treat (alleviate a symptom to some extent, preferably all of the symptoms) of a disease state. The pharmaceutically effective dose depends on the type of disease, the composition used, the route of administration, the type of mammal being treated, the physical characteristics of the specific mammal under consideration, concurrent medication, and other factors that those skilled in the medical arts will recognize. Generally, an amount between 0.1 mg/kg and 100 mg/kg body weight/day of active ingredients is administered dependent upon potency of the negatively charged polymer.

[0510] The nucleic acid molecules of the invention and formulations thereof can be administered orally, topically, parenterally, by inhalation or spray, or rectally in dosage unit formulations containing conventional non-toxic pharmaceutically acceptable carriers, adjuvants and/or vehicles. The term parenteral as used herein includes percutaneous, subcutaneous, intravascular (e.g., intravenous), intramuscular, or intrathecal injection or infusion techniques and the like. In addition, there is provided a pharmaceutical formulation comprising a nucleic acid molecule of the invention and a pharmaceutically acceptable carrier. One or more nucleic acid molecules of the invention can be present in association with one or more non-toxic pharmaceutically acceptable carriers and/or diluents and/or adjuvants, and if desired other active ingredients. The pharmaceutical compositions containing nucleic acid molecules of the invention can be in a form suitable for oral use, for example, as tablets, troches, lozenges, aqueous or oily suspensions, dispersible powders or granules, emulsion, hard or soft capsules, or syrups or elixirs.

[0511] Compositions intended for oral use can be prepared according to any method known to the art for the manufacture of pharmaceutical compositions and such compositions can contain one or more such sweetening agents, flavoring agents, coloring agents or preservative agents in order to provide pharmaceutically elegant and palatable preparations. Tablets contain the active ingredient in admixture with non-toxic pharmaceutically acceptable excipients that are suitable for the manufacture of tablets. These excipients can be, for example, inert diluents; such as calcium carbonate, sodium carbonate, lactose, calcium phosphate or sodium phosphate; granulating and disintegrating agents, for example, corn starch, or alginic acid; binding agents, for example starch, gelatin or acacia; and lubricating agents, for example magnesium stearate, stearic acid or talc. The tablets can be uncoated or they can be coated by known techniques. In some cases such coatings can be prepared by known techniques to delay disintegration and absorption in the gastrointestinal tract and thereby provide a sustained action over a longer period. For example, a time delay material such as glyceryl monosterate or glyceryl distearate can be employed.

[0512] Formulations for oral use can also be presented as hard gelatin capsules wherein the active ingredient is mixed with an inert solid diluent, for example, calcium carbonate, calcium phosphate or kaolin, or as soft gelatin capsules wherein the active ingredient is mixed with water or an oil medium, for example peanut oil, liquid paraffin or olive oil.

[0513] Aqueous suspensions contain the active materials in a mixture with excipients suitable for the manufacture of aqueous suspensions. Such excipients are suspending agents, for example sodium carboxymethylcellulose, methylcellulose, hydropropyl-methylcellulose, sodium alginate, polyvinylpyrrolidone, gum tragacanth and gum acacia; dispersing or wetting agents can be a naturally-occurring phosphatide, for example, lecithin, or condensation products of an alkylene oxide with fatty acids, for example polyoxyethylene stearate, or condensation products of ethylene oxide with long chain aliphatic alcohols, for example heptadecaethyleneoxycetanol, or condensation products of ethylene oxide with partial esters derived from fatty acids and a hexitol such as polyoxyethylene sorbitol monooleate, or condensation products of ethylene oxide with partial esters derived from fatty acids and hexitol anhydrides, for example polyethylene sorbitan monooleate. The aqueous suspensions can also contain one or more preservatives, for example ethyl, or n-propyl p-hydroxybenzoate, one or more coloring agents, one or more flavoring agents, and one or more sweetening agents, such as sucrose or saccharin.

[0514] Oily suspensions can be formulated by suspending the active ingredients in a vegetable oil, for example arachis oil, olive oil, sesame oil or coconut oil, or in a mineral oil such as liquid paraffin. The oily suspensions can contain a thickening agent, for example beeswax, hard paraffin or cetyl alcohol. Sweetening agents and flavoring agents can be added to provide palatable oral preparations. These compositions can be preserved by the addition of an anti-oxidant such as ascorbic acid

[0515] Dispersible powders and granules suitable for preparation of an aqueous suspension by the addition of water provide the active ingredient in admixture with a dispersing or wetting agent, suspending agent and one or more preservatives. Suitable dispersing or wetting agents or suspending agents are exemplified by those already mentioned above. Additional excipients, for example sweetening, flavoring and coloring agents, can also be present.

[0516] Pharmaceutical compositions of the invention can also be in the form of oil-in-water emulsions. The oily phase can be a vegetable oil or a mineral oil or mixtures of these. Suitable emulsifying agents can be naturally-occurring gums, for example gum acacia or gum tragacanth, naturally-occurring phosphatides, for example soy bean, lecithin, and esters or partial esters derived from fatty acids and hexitol, anhydrides, for example sorbitan monooleate, and condensation products of the said partial esters with ethylene oxide, for example polyoxyethylene sorbitan monooleate. The emulsions can also contain sweetening and flavoring agents.

[0517] Syrups and elixirs can be formulated with sweetening agents, for example glycerol, propylene glycol, sorbitol, glucose or sucrose. Such formulations can also contain a demulcent, a preservative and flavoring and coloring agents. The pharmaceutical compositions can be in the form of a sterile injectable aqueous or oleaginous suspension. This suspension can be formulated according to the known art using those suitable dispersing or wetting agents and suspending agents that have been mentioned above. The sterile injectable preparation can also be a sterile injectable solution or suspension in a non-toxic parentally acceptable diluent or solvent, for example as a solution in 1,3-butanediol. Among the acceptable vehicles and solvents that can be employed are water, Ringer's solution and isotonic sodium chloride solution. In addition, sterile, fixed oils are conventionally employed as a solvent or suspending medium. For this purpose, any bland fixed oil can be employed including synthetic mono- or diglycerides. In addition, fatty acids such as oleic acid find use in the preparation of injectables.

[0518] The nucleic acid molecules of the invention can also be administered in the form of suppositories, e.g., for rectal administration of the drug. These compositions can be prepared by mixing the drug with a suitable non-irritating excipient that is solid at ordinary temperatures but liquid at the rectal temperature and will therefore melt in the rectum to release the drug. Such materials include cocoa butter and polyethylene glycols.

[0519] Nucleic acid molecules of the invention can be administered parenterally in a sterile medium. The drug, depending on the vehicle and concentration used, can either be suspended or dissolved in the vehicle. Advantageously, adjuvants such as local anesthetics, preservatives and buffering agents can be dissolved in the vehicle.

[0520] Dosage levels of the order of from about 0.1 mg to about 140 mg per kilogram of body weight per day are useful in the treatment of the above-indicated conditions (about 0.5 mg to about 7 g per subject per day). The amount of active ingredient that can be combined with the carrier materials to produce a single dosage form varies depending upon the host treated and the particular mode of administration. Dosage unit forms generally contain between from about 1 mg to about 500 mg of an active ingredient.

[0521] It is understood that the specific dose level for any particular subject depends upon a variety of factors including the activity of the specific compound employed, the age, body weight, general health, sex, diet, time of administration, route of administration, and rate of excretion, drug combination and the severity of the particular disease undergoing therapy.

[0522] For administration to non-human animals, the composition can also be added to the animal feed or drinking water. It can be convenient to formulate the animal feed and drinking water compositions so that the animal takes in a therapeutically appropriate quantity of the composition along with its diet. It can also be convenient to present the composition as a premix for addition to the feed or drinking water.

[0523] The nucleic acid molecules of the present invention can also be administered to a subject in combination with other therapeutic compounds to increase the overall therapeutic effect. The use of multiple compounds to treat an indication can increase the beneficial effects while reducing the presence of side effects.

[0524] In one embodiment, the invention comprises compositions suitable for administering nucleic acid molecules of the invention to specific cell types. For example, the asialoglycoprotein receptor (ASGPr) (Wu and Wu, 1987, J. Biol. Chem. 262, 4429-4432) is unique to hepatocytes and binds branched galactose-terminal glycoproteins, such as asialoorosomucoid (ASOR). In another example, the folate receptor is overexpressed in many cancer cells. Binding of such glycoproteins, synthetic glycoconjugates, or folates to the receptor takes place with an affinity that strongly depends on the degree of branching of the oligosaccharide chain, for example, triatennary structures are bound with greater affinity than biatenarry or monoatennary chains (Baenziger and Fiete, 1980, Cell, 22, 611-620; Connolly et al., 1982, J. Biol. Chem., 257, 939-945). Lee and Lee, 1987, Glycoconjugate J., 4, 317-328, obtained this high specificity through the use of N-acetyl-D-galactosamine as the carbohydrate moiety, which has higher affinity for the receptor, compared to galactose. This “clustering effect” has also been described for the binding and uptake of mannosyl-terminating glycoproteins or glycoconjugates (Ponpipom et al., 1981, J. Med. Chem., 24, 1388-1395). The use of galactose, galactosamine, or folate based conjugates to transport exogenous compounds across cell membranes can provide a targeted delivery approach to, for example, the treatment of liver disease, cancers of the liver, or other cancers. The use of bioconjugates can also provide a reduction in the required dose of therapeutic compounds required for treatment. Furthermore, therapeutic bioavailability, pharmacodynamics, and pharmacokinetic parameters can be modulated through the use of nucleic acid bioconjugates of the invention. Non-limiting examples of such bioconjugates are described in Vargeese et al., U.S. Ser. No. 10/201,394, filed Aug. 13, 2001; and Matulic-Adamic et al., U.S. Ser. No. 60/362,016, filed Mar. 6, 2002.

[0525] Alternatively, certain siNA molecules of the instant invention can be expressed within cells from eukaryotic promoters (e.g., Izant and Weintraub, 1985, Science, 229, 345; McGarry and Lindquist, 1986, Proc. Natl. Acad. Sci., USA 83, 399; Scanlon et al., 1991, Proc. Natl. Acad. Sci. USA, 88, 10591-5; Kashani-Sabet et al., 1992, Antisense Res. Dev., 2, 3-15; Dropulic et al., 1992, J. Virol., 66, 1432-41; Weerasinghe et al., 1991, J. Virol., 65, 5531-4; Ojwang et al., 1992, Proc. Natl. Acad. Sci. USA, 89, 10802-6; Chen et al., 1992, Nucleic Acids Res., 20, 4581-9; Sarver et al., 1990 Science, 247, 1222-1225; Thompson et al., 1995, Nucleic Acids Res., 23, 2259; Good et al., 1997, Gene Therapy, 4, 45. Those skilled in the art realize that any nucleic acid can be expressed in eukaryotic cells from the appropriate DNA/RNA vector. The activity of such nucleic acids can be augmented by their release from the primary transcript by a enzymatic nucleic acid (Draper et al., PCT WO 93/23569, and Sullivan et al., PCT WO 94/02595; Ohkawa et al., 1992, Nucleic Acids Symp. Ser., 27, 15-6; Taira et al., 1991, Nucleic Acids Res., 19, 5125-30; Ventura et al., 1993, Nucleic Acids Res., 21, 3249-55; Chowrira et al., 1994, J. Biol. Chem., 269, 25856.

[0526] In another aspect of the invention, RNA molecules of the present invention can be expressed from transcription units (see for example Couture et al., 1996, TIG., 12, 510) inserted into DNA or RNA vectors. The recombinant vectors can be DNA plasmids or viral vectors. siNA expressing viral vectors can be constructed based on, but not limited to, adeno-associated virus, retrovirus, adenovirus, or alphavirus. In another embodiment, pol III based constructs are used to express nucleic acid molecules of the invention (see for example Thompson, U.S. Pats. Nos. 5,902,880 and 6,146,886). The recombinant vectors capable of expressing the siNA molecules can be delivered as described above, and persist in target cells. Alternatively, viral vectors can be used that provide for transient expression of nucleic acid molecules. Such vectors can be repeatedly administered as necessary. Once expressed, the siNA molecule interacts with the target mRNA and generates an RNAi response. Delivery of siNA molecule expressing vectors can be systemic, such as by intravenous or intramuscular administration, by administration to target cells ex-planted from a subject followed by reintroduction into the subject, or by any other means that would allow for introduction into the desired target cell (for a review see Couture et al, 1996, TIG., 12, 510).

[0527] In one aspect the invention features an expression vector comprising a nucleic acid sequence encoding at least one siNA molecule of the instant invention. The expression vector can encode one or both strands of a siNA duplex, or a single self-complementary strand that self hybridizes into a siNA duplex. The nucleic acid sequences encoding the siNA molecules of the instant invention can be operably linked in a manner that allows expression of the siNA molecule (see for example Paul et al, 2002, Nature Biotechnology, 19, 505; Miyagishi and Taira, 2002, Nature Biotechnology, 19, 497; Lee et al., 2002, Nature Biotechnology, 19, 500; and Novina et al., 2002, Nature Medicine, advance online publication doi:10.1038/nm725).

[0528] In another aspect, the invention features an expression vector comprising: a) a transcription initiation region (e.g., eukaryotic pol I, II or III initiation region); b) a transcription termination region (e.g., eukaryotic pol I, II or III termination region); and c) a nucleic acid sequence encoding at least one of the siNA molecules of the instant invention, wherein said sequence is operably linked to said initiation region and said termination region in a manner that allows expression and/or delivery of the siNA molecule. The vector can optionally include an open reading frame (ORF) for a protein operably linked on the 5′ side or the 3′-side of the sequence encoding the siNA of the invention; and/or an intron (intervening sequences).

[0529] Transcription of the siNA molecule sequences can be driven from a promoter for eukaryotic RNA polymerase I (pol I), RNA polymerase II (pol II), or RNA polymerase III (pol III). Transcripts from pol II or pol III promoters are expressed at high levels in all cells; the levels of a given pol II promoter in a given cell type depends on the nature of the gene regulatory sequences (enhancers, silencers, etc.) present nearby. Prokaryotic RNA polymerase promoters are also used, providing that the prokaryotic RNA polymerase enzyme is expressed in the appropriate cells (Elroy-Stein and Moss, 1990, Proc. Natl. Acad. Sci. USA, 87, 6743-7; Gao and Huang 1993, Nucleic Acids Res., 21, 2867-72; Lieber et al., 1993, Methods Enzymol., 217, 47-66; Zhou et al., 1990, Mol. Cell. Biol., 10, 4529-37). Several investigators have demonstrated that nucleic acid molecules expressed from such promoters can function in mammalian cells (e.g. Kashani-Sabet et al., 1992, Antisense Res. Dev, 2, 3-15; Ojwang et al., 1992, Proc. Natl. Acad. Sci. USA, 89, 10802-6; Chen et al., 1992, Nucleic Acids Res., 20, 4581-9; Yu et al., 1993, Proc. Natl. Acad. Sci. USA, 90, 6340-4; L'Huillier et al., 1992, EMBO J., 11, 4411-8; Lisziewicz et al, 1993, Proc. Natl. Acad. Sci. U.S.A, 90, 8000-4; Thompson et al., 1995, Nucleic Acids Res., 23, 2259; Sullenger & Cech, 1993, Science, 262, 1566). More specifically, transcription units such as the ones derived from genes encoding U6 small nuclear (snRNA), transfer RNA (tRNA) and adenovirus VA RNA are useful in generating high concentrations of desired RNA molecules such as siNA in cells (Thompson et al., supra; Couture and Stinchcomb, 1996, supra; Noonberg et al., 1994, Nucleic Acid Res., 22, 2830; Noonberg et al., U.S. Pat. No. 5,624,803; Good et al., 1997, Gene Ther., 4, 45; Beigelman et al., International PCT Publication No. WO 96/18736. The above siNA transcription units can be incorporated into a variety of vectors for introduction into mammalian cells, including but not restricted to, plasmid DNA vectors, viral DNA vectors (such as adenovirus or adeno-associated virus vectors), or viral RNA vectors (such as retroviral or alphavirus vectors) (for a review see Couture and Stinchcomb, 1996, supra).

[0530] In another aspect the invention features an expression vector comprising a nucleic acid sequence encoding at least one of the siNA molecules of the invention in a manner that allows expression of that siNA molecule. The expression vector comprises in one embodiment; a) a transcription initiation region; b) a transcription termination region; and c) a nucleic acid sequence encoding at least one strand of the siNA molecule, wherein the sequence is operably linked to the initiation region and the termination region in a manner that allows expression and/or delivery of the siNA molecule.

[0531] In another embodiment the expression vector comprises: a) a transcription initiation region; b) a transcription termination region; c) an open reading frame; and d) a nucleic acid sequence encoding at least one strand of a siNA molecule, wherein the sequence is operably linked to the 3′-end of the open reading frame and wherein the sequence is operably linked to the initiation region, the open reading frame and the termination region in a manner that allows expression and/or delivery of the siNA molecule. In yet another embodiment, the expression vector comprises: a) a transcription initiation region; b) a transcription termination region; c) an intron; and d) a nucleic acid sequence encoding at least one siNA molecule, wherein the sequence is operably linked to the initiation region, the intron and the termination region in a manner which allows expression and/or delivery of the nucleic acid molecule.

[0532] In another embodiment, the expression vector comprises: a) a transcription initiation region; b) a transcription termination region; c) an intron; d) an open reading frame; and e) a nucleic acid sequence encoding at least one strand of a siNA molecule, wherein the sequence is operably linked to the 3′-end of the open reading frame and wherein the sequence is operably linked to the initiation region, the intron, the open reading frame and the termination region in a manner which allows expression and/or delivery of the siNA molecule.

### Interleukin and Interleukin Receptor Biology and Biochemistry

[0533] The following discussion is adapted from R&D Systems Mini-Reveiws and Tech Notes, Cytokine Mini-Reviews, Copyright ©2002 R&D Systems. Interleukin 2 (IL-2) is a lymphokine synthesized and secreted primarily by T helper lymphocytes that have been activated by stimulation with certain mitogens or by interaction of the T cell receptor complex with antigen/MHC complexes on the surfaces of antigen-presenting cells. The response of T helper cells to activation is induction of the expression of IL-2 and receptors for IL-2 and, subsequently, clonal expansion of antigen-specific T cells. At this level IL-2 is an autocrine factor, driving the expansion of the antigen-specific cells. IL-2 also acts as a paracrine factor, influencing the activity of other cells, both within the immune system and outside of it. B cells and natural killer (NK) cells respond, when properly activated, to IL-2. The so-called lymphocyte activated killer, or LAK cells, appear to be derived from NK cells under the influence of IL-2.

[0534] The biological activities of IL-2 are mediated through the binding of IL-2 to a multisubunit cellular receptor. Although three distinct transmembrane glycoprotein subunits contribute to the formation of the high affinity IL-2 receptor, various combinations of receptor subunits (alpha, beta, gamma) are known to occur.

[0535] Interleukin 1 (IL-1) is a general name for two distinct proteins, IL-1a and IL-1b, that are considered the first of a family of regulatory and inflammatory cytokines. Along with IL-1 receptor antagonist (IL-1ra)₂ and IL-18,3 these molecules play important roles in the up- and down-regulation of acute inflammation. In the immune system, the production of IL-1 is typically induced, generally resulting in inflammation. IL-1b and TNF-a are generally thought of as prototypical pro-inflammatory cytokines. The effects of IL-1, however, are not limited to inflammation, as IL-1 has also been associated with bone formation and remodeling, insulin secretion, appetite regulation, fever induction, neuronal phenotype development, and IGF/GH physiology. IL-1 has also been known by a number of alternative names, including lymphocyte activating factor, endogenous pyrogen, catabolin, hemopoietin-1, melanoma growth inhibition factor, and osteoclast activating factor. IL-1a and IL-1b exert their effects by binding to specific receptors. Two distinct IL-1 receptor binding proteins, plus a non-binding signaling accessory protein have been identified to date. Each have three extracellular immunoglobulin-like (Ig-like) domains, qualifying them for membership in the type IV cytokine receptor family.

[0536] Interleukin-4 (IL-4) mediates important pro-inflammatory functions in asthma including induction of the IgE isotype switch, expression of vascular cell adhesion molecule-1 (VCAM-1), promotion of eosinophil transmigration across endothelium, mucus secretion, and differentiation of T helper type 2 lymphocytes leading to cytokine release. Asthma has been linked to polymorphisms in the IL-4 gene promoter and proteins involved in IL-4 signaling. Soluble recombinant IL-4 receptor lacks transmembrane and cytoplasmic activating domains and can therefore sequester IL-4 without mediating cellular activation. Genetic variants within the IL-4 signalling pathway might contribute to the risk of developing asthma in a given individual. A number of polymorphisms have been described within the IL-4 receptor a (IL-4Rα) gene, and in addition, polymorphism occurs in the promoter for the IL-4 gene itself (see for example Hall, 2000, Respir. Res., 1, 6-8 and Ober et al., 2000, Am J Hum Genet., 66, 517-526, for a review). The type 2 cytokine IL-13, which shares a receptor component and signaling pathways with IL-4, was found to be necessary and sufficient for the expression of allergic asthma (see Wills-Karp et al., 1998, Science, 282, 2258-61). IL-13 induces the pathophysiological features of asthma in a manner that is independent of immunoglobulin E and eosinophils. Thus, IL-13 is critical to allergen-induced asthma but operates through mechanisms other than those that are classically implicated in allergic responses.

[0537] Human IL-5 is a 134 amino acid polypeptide with a predicted mass of 12.5 kDa. It is secreted by a restricted number of mesenchymal cell types. In its native state, mature IL-5 is synthesized as a 115 aa, highly glycosylated 22 kDa monomer that forms a 40-50 kDa disulfide-linked homodimer. Although the content of carbohydrate is high, carbohydrate is not needed for bioactivity. Monomeric IL-5 has no activity; a homodimer is required for function. This is in contrast to the receptor-related cytokines IL-3 and GM-CSF, which exist only as monomers. Just as one IL-3 and GM-CSF monomer binds to one receptor, one IL-5 homodimer is able to engage only one IL-5 receptor. It has been suggested that IL-5 (as a dimer) undergoes a general conformational change after binding to one receptor molecule, and this change precludes binding to a second receptor. The receptor for IL-5 consists of a ligand binding a-subunit and a non-ligand binding (common) signal transducing b-subunit that is shared by the receptors for IL-3 and GM-CSF. IL-5 appears to perform a number of functions on eosinophils. These include the down modulation of Mac-1, the upregulation of receptors for IgA and IgG, the stimulation of lipid mediator (leukotriene C4 and PAF) secretion and the induction of granule release. IL-5 also promotes the growth and differentiation of eosinophils.

[0538] Interleukin 6 (IL-6) is considered a prototypic pleiotrophic cytokine. This is reflected in the variety of names originally assigned to IL-6 based on function, including Interferon b2, IL-1-inducible 26 kD Protein, Hepatocyte Stimulating Factor, Cytotoxic T-cell Differentiation Factor, B cell Differentiation Factor (BCDF) and/or B cell Stimulatory Factor 2 (BSF2). A number of cytokines make up an IL-6 cytokine family. Membership in this family is typically based on a helical cytokine structure and receptor subunit makeup. The functional receptor for IL-6 is a complex of two transmembrane glycoproteins (gp130 and IL-6 receptor) that are members of the Class I cytokine receptor superfamily.

[0539] Because of the central role of the interleukin family of cytokines in the mediation of immune and inflammatory responses, modulation of interleukin expression and/or activity can provide important functions in therapeutic and diagnostic applications. The use of small interfering nucleic acid molecules targeting interleukins and their corresponding receptors therefore provides a class of novel therapeutic agents that can be used in the treatment of cancers, proliferative diseases, inflammatory disease, respiratory disease, pulmonary disease, cardiovascular disease, autoimmune disease, neurologic disease, infectious disease, prior disease, renal disease, transplant rejection, or any other disease or condition that responds to modulation of interleukin and interleukin receptor genes.

### EXAMPLES

[0540] The following are non-limiting examples showing the selection, isolation, synthesis and activity of nucleic acids of the instant invention.

### Example 1

### Tandem Synthesis of siNA Constructs

[0541] Exemplary siNA molecules of the invention are synthesized in tandem using a cleavable linker, for example, a succinyl-based linker. Tandem synthesis as described herein is followed by a one-step purification process that provides RNAi molecules in high yield. This approach is highly amenable to siNA synthesis in support of high throughput RNAi screening, and can be readily adapted to multi-column or multi-well synthesis platforms.

[0542] After completing a tandem synthesis of a siNA oligo and its complement in which the 5′-terminal dimethoxytrityl (5′-O-DMT) group remains intact (trityl on synthesis), the oligonucleotides are deprotected as described above. Following deprotection, the siNA sequence strands are allowed to spontaneously hybridize. This hybridization yields a duplex in which one strand has retained the 5′-O-DMT group while the complementary strand comprises a terminal 5′-hydroxyl. The newly formed duplex behaves as a single molecule during routine solid-phase extraction purification (Trityl-On purification) even though only one molecule has a dimethoxytrityl group. Because the strands form a stable duplex, this dimethoxytrityl group (or an equivalent group, such as other trityl groups or other hydrophobic moieties) is all that is required to purify the pair of oligos, for example, by using a C18 cartridge.

[0543] Standard phosphoramidite synthesis chemistry is used up to the point of introducing a tandem linker, such as an inverted deoxy abasic succinate or glyceryl succinate linker (see FIG. 1) or an equivalent cleavable linker. A non-limiting example of linker coupling conditions that can be used includes a hindered base such as diisopropylethylamine (DIPA) and/or DMAP in the presence of an activator reagent such as Bromotripyrrolidinophosphoniumhexafluororophosphate (PyBrOP). After the linker is coupled, standard synthesis chemistry is utilized to complete synthesis of the second sequence leaving the terminal the 5′-O-DMT intact. Following synthesis, the resulting oligonucleotide is deprotected according to the procedures described herein and quenched with a suitable buffer, for example with 50 mM NaOAc or 1.5M NH₄H₂CO₃.

[0544] Purification of the siNA duplex can be readily accomplished using solid phase extraction, for example, using a Waters C18 SepPak 1 g cartridge conditioned with 1 column volume (CV) of acetonitrile, 2 CV H₂O, and 2 CV 50 mM NaOAc. The sample is loaded and then washed with 1 CV H2O or 50 mM NaOAc. Failure sequences are eluted with 1 CV 14% ACN (Aqueous with 50 mM NaOAc and 50 mM NaCl). The column is then washed, for example with 1 CV H₂O followed by on-column detritylation, for example by passing 1 CV of 1% aqueous trifluoroacetic acid (TFA) over the column, then adding a second CV of 1% aqueous TFA to the column and allowing to stand for approximately 10 minutes. The remaining TFA solution is removed and the column washed with H₂O followed by 1 CV 1M NaCl and additional H₂O. The siNA duplex product is then eluted, for example, using 1 CV 20% aqueous CAN.

[0545] FIG. 2 provides an example of MALDI-TOF mass spectrometry analysis of a purified siNA construct in which each peak corresponds to the calculated mass of an individual siNA strand of the siNA duplex. The same purified siNA provides three peaks when analyzed by capillary gel electrophoresis (CGE), one peak presumably corresponding to the duplex siNA, and two peaks presumably corresponding to the separate siNA sequence strands. Ion exchange HPLC analysis of the same siNA contract only shows a single peak. Testing of the purified siNA construct using a luciferase reporter assay described below demonstrated the same RNAi activity compared to siNA constructs generated from separately synthesized oligonucleotide sequence strands.

### Example 2

### Identification of Potential siNA Target Sites in Any RNA Sequence

[0546] The sequence of an RNA target of interest, such as a viral or human mRNA transcript, is screened for target sites, for example by using a computer folding algorithm. In a non-limiting example, the sequence of a gene or RNA gene transcript derived from a database, such as GenBank, is used to generate siNA targets having complementarity to the target. Such sequences can be obtained from a database, or can be determined experimentally as known in the art. Target sites that are known, for example, those target sites determined to be effective target sites based on studies with other nucleic acid molecules, for example ribozymes or antisense, or those targets known to be associated with a disease, trait, or condition such as those sites containing mutations or deletions, can be used to design siNA molecules targeting those sites. Various parameters can be used to determine which sites are the most suitable target sites within the target RNA sequence. These parameters include but are not limited to secondary or tertiary RNA structure, the nucleotide base composition of the target sequence, the degree of homology between various regions of the target sequence, or the relative position of the target sequence within the RNA transcript. Based on these determinations, any number of target sites within the RNA transcript can be chosen to screen siNA molecules for efficacy, for example by using in vitro RNA cleavage assays, cell culture, or animal models. In a non-limiting example, anywhere from 1 to 1000 target sites are chosen within the transcript based on the size of the siNA construct to be used. High throughput screening assays can be developed for screening siNA molecules using methods known in the art, such as with multi-well or multi-plate assays to determine efficient reduction in target gene expression.

### Example 3

### Selection of siNA Molecule Target Sites in a RNA

[0547] The following non-limiting steps can be used to carry out the selection of siNAs targeting a given gene sequence or transcript.
[0548] 1. The target sequence is parsed in silico into a list of all fragments or subsequences of a particular length, for example 23 nucleotide fragments, contained within the target sequence. This step is typically carried out using a custom Perl script, but commercial sequence analysis programs such as Oligo, MacVector, or the GCG Wisconsin Package can be employed as well.
[0549] 2. In some instances the siNAs correspond to more than one target sequence; such would be the case for example in targeting different transcripts of the same gene, targeting different transcripts of more than one gene, or for targeting both the human gene and an animal homolog. In this case, a subsequence list of a particular length is generated for each of the targets, and then the lists are compared to find matching sequences in each list. The subsequences are then ranked according to the number of target sequences that contain the given subsequence; the goal is to find subsequences that are present in most or all of the target sequences. Alternately, the ranking can identify subsequences that are unique to a target sequence, such as a mutant target sequence. Such an approach would enable the use of siNA to target specifically the mutant sequence and not effect the expression of the normal sequence.
[0550] 3. In some instances the siNA subsequences are absent in one or more sequences while present in the desired target sequence; such would be the case if the siNA targets a gene with a paralogous family member that is to remain untargeted. As in case 2 above, a subsequence list of a particular length is generated for each of the targets, and then the lists are compared to find sequences that are present in the target gene but are absent in the untargeted paralog.
[0551] 4. The ranked siNA subsequences can be further analyzed and ranked according to GC content. A preference can be given to sites containing 30-70% GC, with a further preference to sites containing 40-60% GC.
[0552] 5. The ranked siNA subsequences can be further analyzed and ranked according to self-folding and internal hairpins. Weaker internal folds are preferred; strong hairpin structures are to be avoided.
[0553] 6. The ranked siNA subsequences can be further analyzed and ranked according to whether they have runs of GGG or CCC in the sequence. GGG (or even more Gs) in either strand can make oligonucleotide synthesis problematic and can potentially interfere with RNAi activity, so it is avoided whenever better sequences are available. CCC is searched in the target strand because that will place GGG in the antisense strand.
[0554] 7. The ranked siNA subsequences can be further analyzed and ranked according to whether they have the dinucleotide TU (uridine dinucleotide) on the 3′-end of the sequence, and/or AA on the 5′-end of the sequence (to yield 3′ UU on the antisense sequence). These sequences allow one to design siNA molecules with terminal TT thymidine dinucleotides.
[0555] 8. Four or five target sites are chosen from the ranked list of subsequences as described above. For example, in subsequences having 23 nucleotides, the right 21 nucleotides of each chosen 23-mer subsequence are then designed and synthesized for the upper (sense) strand of the siNA duplex, while the reverse complement of the left 21 nucleotides of each chosen 23-mer subsequence are then designed and synthesized for the lower (antisense) strand of the siNA duplex (see Tables II and II). If terminal TT residues are desired for the sequence (as described in paragraph 7), then the two 3′ terminal nucleotides of both the sense and antisense strands are replaced by TT prior to synthesizing the oligos.
[0556] 9. The siNA molecules are screened in an in vitro, cell culture or animal model system to identify the most active siNA molecule or the most preferred target site within the target RNA sequence.
[0557] 10. Other design considerations can be used when selecting target nucleic acid sequences, see, for example, Reynolds et al., 2004, Nature Biotechnology Advanced Online Publication, 1 Feb. 2004, doi:10.1038/nbt936 and Ui-Tei et al., 2004, Nucleic Acids Research, 32, doi:10.1093/nar/gkh247.

[0558] In an alternate approach, a pool of siNA constructs specific to a interleukin and/or interleukin receptor target sequence is used to screen for target sites in cells expressing interleukin and/or interleukin receptor RNA, such as cultured Jurkat, HeLa, A549 or 293T cells. The general strategy used in this approach is shown in FIG. 9. A non-limiting example of such is a pool comprising sequences having any of SEQ ID NOS 1-1260 and 1269-2358. Cells expressing interleukin and/or interleukin receptor are transfected with the pool of siNA constructs and cells that demonstrate a phenotype associated with interleukin and/or interleukin receptor inhibition are sorted. The pool of siNA constructs can be expressed from transcription cassettes inserted into appropriate vectors (see for example FIG. 7 and FIG. 8). The siNA from cells demonstrating a positive phenotypic change (e.g., decreased proliferation, decreased interleukin and/or interleukin receptor mRNA levels or decreased interleukin and/or interleukin receptor protein expression), are sequenced to determine the most suitable target site(s) within the target interleukin and/or interleukin receptor RNA sequence.

### Example 4

### Interleukin and/or Interleukin Receptor Targeted siNA Design

[0559] siNA target sites were chosen by analyzing sequences of the interleukin and/or interleukin receptor RNA target and optionally prioritizing the target sites on the basis of folding (structure of any given sequence analyzed to determine siNA accessibility to the target), by using a library of siNA molecules as described in Example 3, or alternately by using an in vitro siNA system as described in Example 6 herein. siNA molecules were designed that could bind each target and are optionally individually analyzed by computer folding to assess whether the siNA molecule can interact with the target sequence. Varying the length of the siNA molecules can be chosen to optimize activity. Generally, a sufficient number of complementary nucleotide bases are chosen to bind to, or otherwise interact with, the target RNA, but the degree of complementarity can be modulated to accommodate siNA duplexes or varying length or base composition. By using such methodologies, siNA molecules can be designed to target sites within any known RNA sequence, for example those RNA sequences corresponding to the any gene transcript.

[0560] Chemically modified siNA constructs are designed to provide nuclease stability for systemic administration in vivo and/or improved pharmacokinetic, localization, and delivery properties while preserving the ability to mediate RNAi activity. Chemical modifications as described herein are introduced synthetically using synthetic methods described herein and those generally known in the art. The synthetic siNA constructs are then assayed for nuclease stability in serum and/or cellular/tissue extracts (e.g. liver extracts). The synthetic siNA constructs are also tested in parallel for RNAi activity using an appropriate assay, such as a luciferase reporter assay as described herein or another suitable assay that can quantity RNAi activity. Synthetic siNA constructs that possess both nuclease stability and RNAi activity can be further modified and re-evaluated in stability and activity assays. The chemical modifications of the stabilized active siNA constructs can then be applied to any siNA sequence targeting any chosen RNA and used, for example, in target screening assays to pick lead siNA compounds for therapeutic development (see for example FIG. 11).

### Example 5

### Chemical Synthesis and Purification of siNA

[0561] siNA molecules can be designed to interact with various sites in the RNA message, for example, target sequences within the RNA sequences described herein. The sequence of one strand of the siNA molecule(s) is complementary to the target site sequences described above. The siNA molecules can be chemically synthesized using methods described herein. Inactive siNA molecules that are used as control sequences can be synthesized by scrambling the sequence of the siNA molecules such that it is not complementary to the target sequence. Generally, siNA constructs can by synthesized using solid phase oligonucleotide synthesis methods as described herein (see for example Usman et al., U.S. Pat. Nos. 5,804,683; 5,831,071; 5,998,203; 6,117,657; 6,353,098; 6,362,323; 6,437,117; 6,469,158; Scaringe et al., U.S. Pat. Nos. 6,111,086; 6,008,400; 6,111,086 all incorporated by reference herein in their entirety).

[0562] In a non-limiting example, RNA oligonucleotides are synthesized in a stepwise fashion using the phosphoramidite chemistry as is known in the art. Standard phosphoramidite chemistry involves the use of nucleosides comprising any of 5′-O-dimethoxytrityl, 2′-O-tert-butyldimethylsilyl, 3′-O-2-Cyanoethyl N,N-diisopropylphosphoroamidite groups, and exocyclic amine protecting groups (e.g. N6-benzoyl adenosine, N4 acetyl cytidine, and N2-isobutyryl guanosine). Alternately, 2′-O—Silyl Ethers can be used in conjunction with acid-labile 2′-O-orthoester protecting groups in the synthesis of RNA as described by Scaringe supra. Differing 2′ chemistries can require different protecting groups, for example 2′-deoxy-2′-amino nucleosides can utilize N-phthaloyl protection as described by Usman et al., U.S. Pat. No. 5,631,360, incorporated by reference herein in its entirety).

[0563] During solid phase synthesis, each nucleotide is added sequentially (3′- to 5′-direction) to the solid support-bound oligonucleotide. The first nucleoside at the 3′-end of the chain is covalently attached to a solid support (e.g., controlled pore glass or polystyrene) using various linkers. The nucleotide precursor, a ribonucleoside phosphoramidite, and activator are combined resulting in the coupling of the second nucleoside phosphoramidite onto the 5′-end of the first nucleoside. The support is then washed and any unreacted 5′-hydroxyl groups are capped with a capping reagent such as acetic anhydride to yield inactive 5′-acetyl moieties. The trivalent phosphorus linkage is then oxidized to a more stable phosphate linkage. At the end of the nucleotide addition cycle, the 5′-O-protecting group is cleaved under suitable conditions (e.g., acidic conditions for trityl-based groups and Fluoride for silyl-based groups). The cycle is repeated for each subsequent nucleotide.

[0564] Modification of synthesis conditions can be used to optimize coupling efficiency, for example by using differing coupling times, differing reagent/phosphoramidite concentrations, differing contact times, differing solid supports and solid support linker chemistries depending on the particular chemical composition of the siNA to be synthesized. Deprotection and purification of the siNA can be performed as is generally described in Usman et al., U.S. Pat. No. 5,831,071, U.S. Pat. No. 6,353,098, U.S. Pat. No. 6,437,117, and Bellon et al., U.S. Pat. No. 6,054,576, U.S. Pat. No. 6,162,909, U.S. Pat. No. 6,303,773, or Scaringe supra, incorporated by reference herein in their entireties. Additionally, deprotection conditions can be modified to provide the best possible yield and purity of siNA constructs. For example, applicant has observed that oligonucleotides comprising 2′-deoxy-2′-fluoro nucleotides can degrade under inappropriate deprotection conditions. Such oligonucleotides are deprotected using aqueous methylamine at about 35° C. for 30 minutes. If the 2′-deoxy-2′-fluoro containing oligonucleotide also comprises ribonucleotides, after deprotection with aqueous methylamine at about 35° C. for 30 minutes, TEA-HF is added and the reaction maintained at about 65° C. for an additional 15 minutes.

### Example 6

### RNAi In Vitro Assay to Assess siNA Activity

[0565] An in vitro assay that recapitulates RNAi in a cell-free system is used to evaluate siNA constructs targeting interleukin and/or interleukin receptor RNA targets. The assay comprises the system described by Tuschl et al., 1999, Genes and Development, 13, 3191-3197 and Zamore et al., 2000, Cell, 101, 25-33 adapted for use with interleukin and/or interleukin receptor target RNA. A Drosophila extract derived from syncytial blastoderm is used to reconstitute RNAi activity in vitro. Target RNA is generated via in vitro transcription from an appropriate interleukin and/or interleukin receptor expressing plasmid using T7 RNA polymerase or via chemical synthesis as described herein. Sense and antisense siNA strands (for example 20 uM each) are annealed by incubation in buffer (such as 100 mM potassium acetate, 30 mM HEPES-KOH, pH 7.4, 2 mM magnesium acetate) for 1 minute at 90° C. followed by 1 hour at 37° C., then diluted in lysis buffer (for example 100 mM potassium acetate, 30 mM HEPES-KOH at pH 7.4, 2 mM magnesium acetate). Annealing can be monitored by gel electrophoresis on an agarose gel in TBE buffer and stained with ethidium bromide. The Drosophila lysate is prepared using zero to two-hour-old embryos from Oregon R flies collected on yeasted molasses agar that are dechorionated and lysed. The lysate is centrifuged and the supernatant isolated. The assay comprises a reaction mixture containing 50% lysate [vol/vol], RNA (10-50 μM final concentration), and 10% [vol/vol] lysis buffer containing siNA (10 nM final concentration). The reaction mixture also contains 10 mM creatine phosphate, 10 ug/ml creatine phosphokinase, 100 um GTP, 100 uM UTP, 100 uM CTP, 500 uM ATP, 5 mM DTT, 0.1 U/uL RNasin (Promega), and 100 uM of each amino acid. The final concentration of potassium acetate is adjusted to 100 mM. The reactions are pre-assembled on ice and preincubated at 25° C. for 10 minutes before adding RNA, then incubated at 25° C. for an additional 60 minutes. Reactions are quenched with 4 volumes of 1.25× Passive Lysis Buffer (Promega). Target RNA cleavage is assayed by RT-PCR analysis or other methods known in the art and are compared to control reactions in which siNA is omitted from the reaction.

[0566] Alternately, internally-labeled target RNA for the assay is prepared by in vitro transcription in the presence of [alpha-³²P] CTP, passed over a G50 Sephadex column by spin chromatography and used as target RNA without further purification. Optionally, target RNA is 5′-³²P-end labeled using T4 polynucleotide kinase enzyme. Assays are performed as described above and target RNA and the specific RNA cleavage products generated by RNAi are visualized on an autoradiograph of a gel. The percentage of cleavage is determined by PHOSPHOR IMAGER® (autoradiography) quantitation of bands representing intact control RNA or RNA from control reactions without siNA and the cleavage products generated by the assay.

[0567] In one embodiment, this assay is used to determine target sites in the interleukin and/or interleukin receptor RNA target for siNA mediated RNAi cleavage, wherein a plurality of siNA constructs are screened for RNAi mediated cleavage of the interleukin and/or interleukin receptor RNA target, for example, by analyzing the assay reaction by electrophoresis of labeled target RNA, or by northern blotting, as well as by other methodology well known in the art.

### Example 7

### Nucleic Acid Inhibition of Interleukin and/or Interleukin Receptor Target RNA In Vivo

[0568] siNA molecules targeted to the human interleukin and/or interleukin receptor RNA are designed and synthesized as described above. These nucleic acid molecules can be tested for cleavage activity in vivo, for example, using the following procedure. The target sequences and the nucleotide location within the interleukin and/or interleukin receptor RNA are given in Table II and III.

[0569] Two formats are used to test the efficacy of siNAs targeting interleukin and/or interleukin receptor. First, the reagents are tested in cell culture using, for example, Jurkat, HeLa, A549 or 293T cells, to determine the extent of RNA and protein inhibition. siNA reagents (e.g.; see Tables II and III) are selected against the interleukin and/or interleukin receptor target as described herein. RNA inhibition is measured after delivery of these reagents by a suitable transfection agent to, for example, Jurkat, HeLa, A549 or 293T cells. Relative amounts of target RNA are measured versus actin using real-time PCR monitoring of amplification (eg., ABI 7700 TAQMAN®). A comparison is made to a mixture of oligonucleotide sequences made to unrelated targets or to a randomized siNA control with the same overall length and chemistry, but randomly substituted at each position. Primary and secondary lead reagents are chosen for the target and optimization performed. After an optimal transfection agent concentration is chosen, a RNA time-course of inhibition is performed with the lead siNA molecule. In addition, a cell-plating format can be used to determine RNA inhibition.

Delivery of siNA to Cells

[0570] Cells (e.g., Jurkat, HeLa, A549 or 293T cells) are seeded, for example, at 1×10⁵ cells per well of a six-well dish in EGM-2 (BioWhittaler) the day before transfection. siNA (final concentration, for example 20 nM) and cationic lipid (e.g., final concentration 2 μg/ml) are complexed in EGM basal media (Biowhittaker) at 37° C. for 30 minutes in polystyrene tubes. Following vortexing, the complexed siNA is added to each well and incubated for the times indicated. For initial optimization experiments, cells are seeded, for example, at 1×10³ in 96 well plates and siNA complex added as described. Efficiency of delivery of siNA to cells is determined using a fluorescent siNA complexed with lipid. Cells in 6-well dishes are incubated with siNA for 24 hours, rinsed with PBS and fixed in 2% paraformaldehyde for 15 minutes at room temperature. Uptake of siNA is visualized using a fluorescent microscope.

TAQMAN® (Real-Time PCR Monitoring of Amplification) and Lightcycler Quantification of mRNA

[0571] Total RNA is prepared from cells following siNA delivery, for example, using Qiagen RNA purification kits for 6-well or Rneasy extraction kits for 96-well assays. For TAQMAN® analysis (real-time PCR monitoring of amplification), dual-labeled probes are synthesized with the reporter dye, FAM or JOE, covalently linked at the 5′-end and the quencher dye TAMRA conjugated to the 3′-end. One-step RT-PCR amplifications are performed on, for example, an ABI PRISM 7700 Sequence Detector using 50 μl reactions consisting of 10 μl total RNA, 100 nM forward primer, 900 nM reverse primer, 100 nM probe, 1× TaqMan PCR reaction buffer (PE-Applied Biosystems), 5.5 mM MgCl₂, 300 μM each DATP, dCTP, dGTP, and dTTP, 10 U RNase Inhibitor (Promega), 1.25 U AMPLITAQ GOLD® (DNA polymerase) (PE-Applied Biosystems) and 10 U M-MLV Reverse Transcriptase (Promega). The thermal cycling conditions can consist of 30 minutes at 48° C., 10 minutes at 95° C., followed by 40 cycles of 15 seconds at 95° C. and 1 minute at 600C. Quantitation of mRNA levels is determined relative to standards generated from serially diluted total cellular RNA (300, 100, 33, 11 ng/reaction) and normalizing to β-actin or GAPDH mRNA in parallel TAQMAN® reactions (real-time PCR monitoring of amplification). For each gene of interest an upper and lower primer and a fluorescently labeled probe are designed. Real time incorporation of SYBR Green I dye into a specific PCR product can be measured in glass capillary tubes using a lightcyler. A standard curve is generated for each primer pair using control cRNA. Values are represented as relative expression to GAPDH in each sample.

### Western Blotting

[0572] Nuclear extracts can be prepared using a standard micro preparation technique (see for example Andrews and Faller, 1991, Nucleic Acids Research, 19, 2499). Protein extracts from supernatants are prepared, for example using TCA precipitation. An equal volume of 20% TCA is added to the cell supernatant, incubated on ice for 1 hour and pelleted by centrifugation for 5 minutes. Pellets are washed in acetone, dried and resuspended in water. Cellular protein extracts are run on a 10% Bis-Tris NuPage (nuclear extracts) or 4-12% Tris-Glycine (supernatant extracts) polyacrylamide gel and transferred onto nitro-cellulose membranes. Non-specific binding can be blocked by incubation, for example, with 5% non-fat milk for 1 hour followed by primary antibody for 16 hour at 4° C. Following washes, the secondary antibody is applied, for example (1:10,000 dilution) for 1 hour at room temperature and the signal detected with SuperSignal reagent (Pierce).

### Example 8

### Animal Models Useful to Evaluate the Down-Regulation of Interleukin and/or Interleukin Receptor Gene Expression

[0573] Evaluating the efficacy of anti-interleukin agents in animal models is an important prerequisite to human clinical trials. Allogeneic rejection is the most common cause of corneal graft failure. King et al., 2000, Transplantation, 70, 1225-1233, describe a study investigating the kinetics of cytokine and chemokine mRNA expression before and after the onset of corneal graft rejection. Intracorneal cytokine and chemokine mRNA levels were investigated in the Brown Norway-Lewis inbred rat model, in which rejection onset is observed at 8/9 days after grafting in all animals. Nongrafted corneas and syngeneic (Lewis-Lewis) corneal transplants were used as controls. Donor and recipient cornea were examined by quantitive competitive reverse transcription-polymerase chain reaction (RT-PCR) for hypoxyanthine phosphoribosyltransferase (HPRT), CD3, CD25, interleukin (IL)-1beta, IL-IRA, IL-2, IL-6, IL-10, interferon-gamma (IFN-gamma), tumor necrosis factor (TNF), transforming growth factor (TGF)-beta1, and macrophage inflammatory protein (MIP)-2 and by RT-PCR for IL-4, IL-5, IL-12 p40, IL-13, TGF-beta.2, monocyte chemotactic protein-1 (MCP-1), MIP-1alpha, MIP-1beta, and RANTES. A biphasic expression of cytokine and chemokine mRNA was found after transplantation. During the early phase (days 3-9), there was an elevation of the majority of the cytokines examined, including IL-1beta, IL-6, IL-10, IL-12 p40, and MIP-2. There was no difference in cytokine expression patterns between allogeneic or syngeneic recipients at this time. In syngeneic recipients, cytokine levels reduced to pretransplant levels by day 13, whereas levels of all cytokines rose after the rejection onset in the allografts, including TGF-beta.1, TGF-beta.2, and IL-IRA. The T cell-derived cytokines IL-4, IL-13, and IFN-gamma were detected only during the rejection phase in allogeneic recipients. Thus, there appears to be an early cytokine and chemokine response to the transplantation process, evident in syngeneic and allogeneic grafts, that drives angiogenesis, leukocyte recruitment, and affects other leukocyte functions. After an immune response has been generated, allogeneic rejection results in the expression of Th1 cytokines, Th2 cytokines, and anti-inflammatory/Th3 cytokines. This animal model can be used to evaluate the efficacy of nucleic acid molecules of the invention targeting interleukin expression (e.g., phenotypic change, interleuking expression etc.) toward therapeutic use in treating transplant rejection. Similarly, other animal models of transplant rejection as are known in the art can be used to evaluate nucleic acid molecules (e.g., siNA) of the invention toward therapeutic use.

[0574] Other animal models are useful in evaluating the role of interleukins in asthma. For example, Kuperman et al., 2002, Nature Medicine, 8, 885-9, describe an animal model of IL-13 mediated asthma response animal models of allergic asthma in which blockade of IL-13 markedly inhibits allergen-induced asthma. Venkayya et al., 2002, Am J Respir Cell Mol. Biol., 26, 202-8 and Yang et al., 2001, Am J Respir Cell Mol. Biol., 25, 522-30 describe animal models of airway inflammation and airway hyperresponsiveness (AHR) in which IL-4/IL-4R and IL-13 mediate asthma. These models can be used to evaluate the efficacy of siNA molecules of the invention targeting, for example, IL-4, IL-4R, IL-13, and/or IL-13R for use is treating asthma.

Identification of Active siNA's in Cell Culture and Subsequent Evaluation of Synthetic siNA in Lung for Application to Respiratory Diseases Such as Asthma: Pulmonary-Distribution and Efficacy

[0575] The allergic inflammatory response leading to airway hyperesponssiveness is orchestrated by multiple mediators, including interleukins. An animal model of airway hyperresponsiveness following allergen challenge is used to evaluate the efficacy of siNA molecules of the invention designed to down regulate expression of interleukin and interleukin receptor targets, including IL-4, IL-4R, IL-13, and IL-13R. Several endpoints are evaluated following siNA treatment of allergen challenged animals compared to relevant controls, including lung function, IFN-alpha, IL-1, IL-5, IL-13, IL-10 and IL-12 protein levels in bronchial/alveolar lavage fluid as determined by ELISA. Counts of inflammatory cells including lymphocytes, neutrophils, macrophages, and eosinophils in bronchial/alveolar lavage fluid are taken. Histology is performed to evaluate end-points related to lung function including include thickening of the endothelial cell wall, mucous secretion, goblet cell hyperplasia, and the presence of eosinophils. Levels of IL-4, IL-5, and IL-13 mRNA in lung tissue are evaluated via quantitative PCR (TaqMan).

[0576] Active siNA constructs were identified in cell culture experiments using a dual luciferase reporter system (Promega, Madison, Wis.). The rat IL-4 and IL-13 genes were cloned into the 3′ untranslated region of Renilla luciferase to create a reporter plasmid. Specific siNA-induced degradation of the target sequence in Renilla mRNA transcribed from this plasmid results in a loss of Renilla luciferase signal in plasmid-transfected HeLa cells. The reporter plasmid also contains a copy of the Firefly luciferase gene, which does not contain the target site sequences. In HeLa cells co-transfected with the reporter plasmid and siNAs, the ratio of Renilla to Firefly luciferase activities (using two different substrates) provides a measure of siNA activity. The Firefly luciferase activity provides an internal control for transfection efficiency, toxicity and sample recovery. Using this reporter system, the inhibition of Renilla luciferase by siNAs targeting IL-4 (FIG. 29) and IL-13 (FIG. 30) was examined at a dose of 12.5 nM. As shown in FIGS. 29 and 30, Renilla luciferase activity was dramatically reduced by treatment with several siNA constructs (all greater than 70%). There was little to no inhibitory effect when the inverted control or an irrelevant siNA were tested at 12.5 mM. The most active sequences have IC₅₀s of 300 picomolar in this assay.

[0577] Following identification of active siNA constructs in vitro, a murine model of airway hyperresponsiveness (AHR) was used to assess the effectiveness of siNA's targeting IL-4, IL-4R, IL-13, and IL-13R in mitigating the inflammatory response after an allergic challenge. Assessment of multiple cytokine target mRNA and protein levels, as well as lung function endpoints allow a robust assessment siNA silencing activity in this model. Although IV injection was used for the delivery of siNA in the current study, the model is also ammenable to the use of siNA that is nebulized or delivered in a aerosolized formulation. The ability to deliver via several modalities makes possible the subsequent evaluation of efficacy following delivery by these methods

[0578] In a non-limiting example, 8 to 12 week old BalbC mice were be sensitized by i.p. injection with 20 μg OVA emulsified in 2.25 mg aluminum hydroxide in a total volume of 100 μl on days 1 and 14. Mice were challenged on three consecutive days (days 28, 29, 30) (20 min) via the airways with OVA (1% in normal saline) using ultrasonic nebulization (primary challenge). In the secondary challenge protocol, six weeks after the primary challenge, mice were exposed to a single OVA challenge (1% in normal saline). Administration of siNAs (Table III) was performed by injection into the tail vein. In the current study, a secondary challenge protocol was used and siNAs were administered 72, 48, and 3 hours prior to secondary challenge. In each dose, mice were administered either 30 μg of anti-IL-13 siNA mixed with 30 μg of anti-IL-4R siNA, 30 μg of anti-IL-13R siNA mixed with 30 μg of anti-IL-4R siNA, or 30 μg of each of two irrelevant siNAs. Twelve mice were tested for each group. Administration times of the siNAs can be varied.

[0579] Forty-eight hours following the last challenge airway responsiveness was assessed. Mice were anesthetized with pentobarbital sodium (70-90 mg/kg), tracheostomized and mechanically ventilated. Airway function was measured after challenge with aerosolized methacholine (MCh) via the airways for 10 sec (60 breaths/min, 500-μl tidal volume) in increasing concentrations (1.56, 3.13, 6.25, and 12.5 mg/ml). Immediately after assessment of lung function, lungs were lavaged via the tracheal tube with PBS (1 ml) and differential cell counts were performed. Mice receiving active siNA 38016/38138 and 37910/37958 targeting IL-13 and IL-4R or 37910/37958 and 38195/38243 targeting IL-4R and IL-13R formulated with polyethyleneimine (PEI) showed improved lung function compared to a matched chemistry siNA irrelevant sequence control.

[0580] One-half of the lungs were harvested for mRNA isolation. RT-PCR is used to determine mRNA levels of IL-4, IL-4R, IL-13, IL-13R and IFN-alpha. In addition, IFN-alpha, IL-4, IL-5, IL-13, IL-10, IL-12 levels in the BAL fluid are measured by ELISA. The other half of the harvested lungs were inflated and fixed with 10% formalin for histology.

### Example 9

### RNAi Mediated Inhibition of Interleukin and Interleukin Receptor Expression in Cell Culture Experiments

[0581] siNA constructs (Table III) are tested for efficacy in reducing interleukin and/or interleukin receptor RNA expression in, for example, Jurkat, HeLa, A549, or 293T cells. Cells are plated approximately 24 hours before transfection in 96-well plates at 5,000-7,500 cells/well, 100 μl/well, such that at the time of transfection cells are 70-90% confluent. For transfection, annealed siNAs are mixed with the transfection reagent (Lipofectamine 2000, Invitrogen) in a volume of 50 μl/well and incubated for 20 minutes at room temperature. The siNA transfection mixtures are added to cells to give a final siNA concentration of 25 nM in a volume of 150 μl. Each siNA transfection mixture is added to 3 wells for triplicate siNA treatments. Cells are incubated at 37° for 24 hours in the continued presence of the siNA transfection mixture. At 24 hours, RNA is prepared from each well of treated cells. The supernatants with the transfection mixtures are first removed and discarded, then the cells are lysed and RNA prepared from each well. Target gene expression following treatment is evaluated by RT-PCR for the target gene and for a control gene (36B4, an RNA polymerase subunit) for normalization. The triplicate data is averaged and the standard deviations determined for each treatment. Normalized data are graphed and the percent reduction of target mRNA by active siNAs in comparison to their respective inverted control siNAs is determined.

[0582] In a non-limiting example, chemically modified siNA constructs (Table III) were tested for efficacy as described above in reducing IL-4R RNA expression in HeLa cells. Active siNAs were evaluated compared to untreated cells and a matched chemistry irrelevant control. Results are summarized in FIG. 29. FIG. 29 shows results for chemically modified siNA constructs targeting various sites in IL-4R RNA. As shown in FIG. 29, the active siNA constructs provide significant inhibition of IL-4R gene expression in cell culture experiments as determined by levels of IL-4R mRNA when compared to appropriate controls.

[0583] In another non-limiting example, chemically modified siNA constructs (Table III) were tested for efficacy as described above in reducing IL-13R RNA expression in HeLa cells. Active siNAs were evaluated compared to untreated cells and a matched chemistry irrelevant control. Results are summarized in FIG. 30. FIG. 30 shows results for chemically modified siNA constructs targeting various sites in IL-13R RNA. As shown in FIG. 30, the active siNA constructs provide significant inhibition of IL-13R gene expression in cell culture experiments as determined by levels of IL-13R mRNA when compared to appropriate controls.

### Example 10

### Indications

[0584] The siNA molecule of the invention can be used to prevent, inhibit or treat cancers and other proliferative conditions, viral infection, inflammatory disease, autoimmunity, respiratory disease, pulmonary disease, cardiovascular disease, neurologic disease, renal disease, ocular disease, liver disease, mitochondrial disease, endocrine disease, prion disease, reproduction related diseases and conditions, and/or any other trait, disease or condition that is related to or will respond to the levels of interleukin and/or interleukin receptor in a cell or tissue, alone or in combination with other treatments or therapies. Non-limiting examples of respiratory diseases that can be treated using siNA molecules of the invention (e.g., siNA molecules targeting IL-4, IL-4R, IL-13, and/or IL-13R include asthma, chronic obstructive pulmonary disease or “COPD”, allergic rhinitis, sinusitis, pulmonary vasoconstriction, inflammation, allergies, impeded respiration, respiratory distress syndrome, cystic fibrosis, pulmonary hypertension, pulmonary vasoconstriction, emphysema.

[0585] The use of anticholinergic agents, anti-inflammatories, bronchodilators, adenosine inhibitors, adenosine A1 receptor inhibitors, non-selective M3 receptor antagonists such as atropine, ipratropium brominde and selective M3 receptor antagonists such as darifenacin and revatropate are all non-limiting examples of agents that can be combined with or used in conjunction with the nucleic acid molecules (e.g. siNA molecules) of the instant invention. Immunomodulators, chemotherapeutics, anti-inflammatory compounds, and anti-viral compounds are additional non-limiting examples of pharmaceutical agents that can be combined with or used in conjunction with the nucleic acid molecules (e.g. siNA molecules) of the instant invention for prevention or treatment of traits, diseases and disorders herein. Those skilled in the art will recognize that other drug compounds and therapies can similarly be readily combined with the nucleic acid molecules of the instant invention (e.g. siNA molecules) and are hence within the scope of the instant invention.

### Example 11

### Multifunctional siNA Inhibition of Interleukin and/or Interleukin Receptor RNA Expression

[0586] Multifunctional siNA Design

[0587] Once target sites have been identified for multifunctional siNA constructs, each strand of the siNA is designed with a complementary region of length, for example, of about 18 to about 28 nucleotides, that is complementary to a different target nucleic acid sequence. Each complementary region is designed with an adjacent flanking region of about 4 to about 22 nucleotides that is not complementary to the target sequence, but which comprises complementarity to the complementary region of the other sequence (see for example FIG. 16). Hairpin constructs can likewise be designed (see for example FIG. 17). Identification of complementary, palindrome or repeat sequences that are shared between the different target nucleic acid sequences can be used to shorten the overall length of the multifunctional siNA constructs (see for example FIGS. 18 and 19).

[0588] In a non-limiting example, three additional categories of additional multifunctional siNA designs are presented that allow a single siNA molecule to silence multiple targets. The first method utilizes linkers to join siNAs (or multifunctional siNAs) in a direct manner. This can allow the most potent siNAs to be joined without creating a long, continuous stretch of RNA that has potential to trigger an interferon response. The second method is a dendrimeric extension of the overlapping or the linked multifunctional design; or alternatively the organization of siNA in a supramolecular format. The third method uses helix lengths greater than 30 base pairs. Processing of these siNAs by Dicer will reveal new, active 5′ antisense ends. Therefore, the long siNAs can target the sites defined by the original 5′ ends and those defined by the new ends that are created by Dicer processing. When used in combination with traditional multifunctional siNAs (where the sense and antisense strands each define a target) the approach can be used for example to target 4 or more sites.

I. Tethered Bifunctional siNAs

[0589] The basic idea is a novel approach to the design of multifunctional siNAs in which two antisense siNA strands are annealed to a single sense strand. The sense strand oligonucleotide contains a linker (e.g., non-nucleotide linker as described herein) and two segments that anneal to the antisense siNA strands (see FIG. 22). The linkers can also optionally comprise nucleotide-based linkers. Several potential advantages and variations to this approach include, but are not limited to:
[0590] 1. The two antisense siNAs are independent. Therefore, the choice of target sites is not constrained by a requirement for sequence conservation between two sites. Any two highly active siNAs can be combined to form a multifunctional siNA.
[0591] 2. When used in combination with target sites having homology, siNAs that target a sequence present in two genes (e.g., different interleukin and/or interleukin receptor isoforms), the design can be used to target more than two sites. A single multifunctional siNA can be for example, used to target RNA of two different interleukin and/or interleukin receptor RNAs.
[0592] 3. Multifunctional siNAs that use both the sense and antisense strands to target a gene can also be incorporated into a tethered multifunctional design. This leaves open the possibility of targeting 6 or more sites with a single complex.
[0593] 4. It can be possible to anneal more than two antisense strand siNAs to a single tethered sense strand.
[0594] 5. The design avoids long continuous stretches of dsRNA. Therefore, it is less likely to initiate an interferon response.
[0595] 6. The linker (or modifications attached to it, such as conjugates described herein) can improve the pharmacokinetic properties of the complex or improve its incorporation into liposomes. Modifications introduced to the linker should not impact siNA activity to the same extent that they would if directly attached to the siNA (see for example FIGS. 27 and 28).
[0596] 7. The sense strand can extend beyond the annealed antisense strands to provide additional sites for the attachment of conjugates.
[0597] 8. The polarity of the complex can be switched such that both of the antisense 3′ ends are adjacent to the linker and the 5′ ends are distal to the linker or combination thereof.
   Dendrimer and Supramolecular siNAs

[0598] In the dendrimer siNA approach, the synthesis of siNA is initiated by first synthesizing the dendrimer template followed by attaching various functional siNAs. Various constructs are depicted in FIG. 23. The number of functional siNAs that can be attached is only limited by the dimensions of the dendrimer used.

Supramolecular Approach to Multifunctional siNA

[0599] The supramolecular format simplifies the challenges of dendrimer synthesis. In this format, the siNA strands are synthesized by standard RNA chemistry, followed by annealing of various complementary strands. The individual strand synthesis contains an antisense sense sequence of one siNA at the 5′-end followed by a nucleic acid or synthetic linker, such as hexaethyleneglyol, which in turn is followed by sense strand of another siNA in 5′ to 3′ direction. Thus, the synthesis of siNA strands can be carried out in a standard 3′ to 5′ direction. Representative examples of trifunctional and tetrafunctional siNAs are depicted in FIG. 24. Based on a similar principle, higher functionality siNA constructs can be designed as long as efficient annealing of various strands is achieved.

Dicer Enabled Multifunctional siNA

[0600] Using bioinformatic analysis of multiple targets, stretches of identical sequences shared between differing target sequences can be identified ranging from about two to about fourteen nucleotides in length. These identical regions can be designed into extended siNA helixes (e.g., >30 base pairs) such that the processing by Dicer reveals a secondary functional 5′-antisense site (see for example FIG. 25). For example, when the first 17 nucleotides of a siNA antisense strand (e.g., 21 nucleotide strands in a duplex with 3′-TT overhangs) are complementary to a target RNA, robust silencing was observed at 25 nM. 80% silencing was observed with only 16 nucleotide complementarity in the same format.

[0601] Incorporation of this property into the designs of siNAs of about 30 to 40 or more base pairs results in additional multifunctional siNA constructs. The example in FIG. 25 illustrates how a 30 base-pair duplex can target three distinct sequences after processing by Dicer-RNaseIII; these sequences can be on the same mRNA or separate RNAs, such as viral and host factor messages, or multiple points along a given pathway (e.g., inflammatory cascades). Furthermore, a 40 base-pair duplex can combine a bifunctional design in tandem, to provide a single duplex targeting four target sequences. An even more extensive approach can include use of homologous sequences to enable five or six targets silenced for one multifunctional duplex. The example in FIG. 25 demonstrates how this can be achieved. A 30 base pair duplex is cleaved by Dicer into 22 and 8 base pair products from either end (8 b.p. fragments not shown). For ease of presentation the overhangs generated by dicer are not shown—but can be compensated for. Three targeting sequences are shown. The required sequence identity overlapped is indicated by grey boxes. The N's of the parent 30 b.p. siNA are suggested sites of 2′-OH positions to enable Dicer cleavage if this is tested in stabilized chemistries. Note that processing of a 30 mer duplex by Dicer RNase III does not give a precise 22+8 cleavage, but rather produces a series of closely related products (with 22+8 being the primary site). Therefore, processing by Dicer will yield a series of active siNAs. Another non-limiting example is shown in FIG. 26. A 40 base pair duplex is cleaved by Dicer into 20 base pair products from either end. For ease of presentation the overhangs generated by dicer are not shown—but can be compensated for. Four targeting sequences are shown in four colors, blue, light-blue and red and orange. The required sequence identity overlapped is indicated by grey boxes. This design format can be extended to larger RNAs. If chemically stabilized siNAs are bound by Dicer, then strategically located ribonucleotide linkages can enable designer cleavage products that permit our more extensive repertoire of multifunctional designs. For example cleavage products not limited to the Dicer standard of approximately 22-nucleotides can allow multifunctional siNA constructs with a target sequence identity overlap ranging from, for example, about 3 to about 15 nucleotides.

### Example 12

### Diagnostic Uses

[0602] The siNA molecules of the invention can be used in a variety of diagnostic applications, such as in the identification of molecular targets (e.g., RNA) in a variety of applications, for example, in clinical, industrial, environmental, agricultural and/or research settings. Such diagnostic use of siNA molecules involves utilizing reconstituted RNAi systems, for example, using cellular lysates or partially purified cellular lysates. siNA molecules of this invention can be used as diagnostic tools to examine genetic drift and mutations within diseased cells or to detect the presence of endogenous or exogenous, for example viral, RNA in a cell. The close relationship between siNA activity and the structure of the target RNA allows the detection of mutations in any region of the molecule, which alters the base-pairing and three-dimensional structure of the target RNA. By using multiple siNA molecules described in this invention, one can map nucleotide changes, which are important to RNA structure and function in vitro, as well as in cells and tissues. Cleavage of target RNAs with siNA molecules can be used to inhibit gene expression and define the role of specified gene products in the progression of disease or infection. In this manner, other genetic targets can be defined as important mediators of the disease. These experiments will lead to better treatment of the disease progression by affording the possibility of combination therapies (e.g., multiple siNA molecules targeted to different genes, siNA molecules coupled with known small molecule inhibitors, or intermittent treatment with combinations siNA molecules and/or other chemical or biological molecules). Other in vitro uses of siNA molecules of this invention are well known in the art, and include detection of the presence of mRNAs associated with a disease, infection, or related condition. Such RNA is detected by determining the presence of a cleavage product after treatment with a siNA using standard methodologies, for example, fluorescence resonance emission transfer (FRET).

[0603] In a specific example, siNA molecules that cleave only wild-type or mutant forms of the target RNA are used for the assay. The first siNA molecules (i.e., those that cleave only wild-type forms of target RNA) are used to identify wild-type RNA present in the sample and the second siNA molecules (i.e., those that cleave only mutant forms of target RNA) are used to identify mutant RNA in the sample. As reaction controls, synthetic substrates of both wild-type and mutant RNA are cleaved by both siNA molecules to demonstrate the relative siNA efficiencies in the reactions and the absence of cleavage of the “non-targeted” RNA species. The cleavage products from the synthetic substrates also serve to generate size markers for the analysis of wild-type and mutant RNAs in the sample population. Thus, each analysis requires two siNA molecules, two substrates and one unknown sample, which is combined into six reactions. The presence of cleavage products is determined using an RNase protection assay so that full-length and cleavage fragments of each RNA can be analyzed in one lane of a polyacrylamide gel. It is not absolutely required to quantify the results to gain insight into the expression of mutant RNAs and putative risk of the desired phenotypic changes in target cells. The expression of mRNA whose protein product is implicated in the development of the phenotype (i.e., disease related or infection related) is adequate to establish risk. If probes of comparable specific activity are used for both transcripts, then a qualitative comparison of RNA levels is adequate and decreases the cost of the initial diagnosis. Higher mutant form to wild-type ratios are correlated with higher risk whether RNA levels are compared qualitatively or quantitatively.

[0604] All patents and publications mentioned in the specification are indicative of the levels of skill of those skilled in the art to which the invention pertains. All references cited in this disclosure are incorporated by reference to the same extent as if each reference had been incorporated by reference in its entirety individually.

[0605] One skilled in the art would readily appreciate that the present invention is well adapted to carry out the objects and obtain the ends and advantages mentioned, as well as those inherent therein. The methods and compositions described herein as presently representative of preferred embodiments are exemplary and are not intended as limitations on the scope of the invention. Changes therein and other uses will occur to those skilled in the art, which are encompassed within the spirit of the invention, are defined by the scope of the claims.

[0606] It will be readily apparent to one skilled in the art that varying substitutions and modifications can be made to the invention disclosed herein without departing from the scope and spirit of the invention. Thus, such additional embodiments are within the scope of the present invention and the following claims. The present invention teaches one skilled in the art to test various combinations and/or substitutions of chemical modifications described herein toward generating nucleic acid constructs with improved activity for mediating RNAi activity. Such improved activity can comprise improved stability, improved bioavailability, and/or improved activation of cellular responses mediating RNAi. Therefore, the specific embodiments described herein are not limiting and one skilled in the art can readily appreciate that specific combinations of the modifications described herein can be tested without undue experimentation toward identifying siNA molecules with improved RNAi activity.

[0607] The invention illustratively described herein suitably can be practiced in the absence of any element or elements, limitation or limitations that are not specifically disclosed herein. Thus, for example, in each instance herein any of the terms “comprising”, “consisting essentially of”, and “consisting of” may be replaced with either of the other two terms. The terms and expressions which have been employed are used as terms of description and not of limitation, and there is no intention that in the use of such terms and expressions of excluding any equivalents of the features shown and described or portions thereof, but it is recognized that various modifications are possible within the scope of the invention claimed. Thus, it should be understood that although the present invention has been specifically disclosed by preferred embodiments, optional features, modification and variation of the concepts herein disclosed may be resorted to by those skilled in the art, and that such modifications and variations are considered to be within the scope of this invention as defined by the description and the appended claims.

[0608] In addition, where features or aspects of the invention are described in terms of Markush groups or other grouping of alternatives, those skilled in the art will recognize that the invention is also thereby described in terms of any individual member or subgroup of members of the Markush group or other group.

TABLE I
Interleukin and Interleukin receptor Accession Numbers
Interleukin Family

| | |
|---|---|
| NM_000575 | Homo sapiens interleukin 1, alpha (IL1A), mRNA |
| NM_000576 | Homo sapiens interleukin 1, beta (IL1B), mRNA |
| NM_012275 | Homo sapiens interleukin 1 family, member 5 (delta) (IL1F5), mRNA |
| NM_014440 | Homo sapiens interleukin 1 family, member 6 (epsilon) (IL1F6), mRNA |
| NM_014439 | Homo sapiens interleukin 1 family, member 7 (zeta) (IL1F7), mRNA |
| NM_014438 | Homo sapiens interleukin 1 family, member 8 (eta) (IL1F8), mRNA |
| NM_019618 | Homo sapiens interleukin 1 family, member 9 (IL1F9), mRNA |
| NM_032556 | Homo sapiens interleukin 1 family, member 10 (theta) (IL1F10), mRNA |
| NM_000586 | Homo sapiens interleukin 2 (IL2), mRNA |
| NM_000588 | Homo sapiens interleukin 3 (colony-stimulating factor, multiple) (IL3), |
| | mRNA |
| NM_000589 | Homo sapiens interleukin 4 (IL4), mRNA |
| NM_000879 | Homo sapiens interleukin 5 (colony-stimulating factor, eosinophil) (IL5), |
| | mRNA |
| NM_000600 | Homo sapiens interleukin 6 (interferon, beta 2) (IL6), mRNA |
| NM_000880 | Homo sapiens interleukin 7 (IL7), mRNA |
| NM_000584 | Homo sapiens interleukin 8 (IL8), mRNA |
| NM_000590 | Homo sapiens interleukin 9 (IL9), mRNA |
| NM_000572 | Homo sapiens interleukin 10 (IL10), mRNA |
| NM_000641 | Homo sapiens interleukin 11 (IL11), mRNA |
| NM_000882 | Homo sapiens interleukin 12A (natural killer cell stimulatory factor 1, |
| | cytotoxic lymphocyte maturation factor 1, p35) (IL12A), mRNA |
| NM_002187 | Homo sapiens interleukin 12B (natural killer cell stimulatory factor 2, |
| | cytotoxic lymphocyte maturation factor 2, p40) (IL12B), mRNA |
| NM_002188 | Homo sapiens interleukin 13 (IL13), mRNA |
| L15344 | Homo sapiens interleukin 14 (IL14), mRNA |
| NM_000585 | Homo sapiens interleukin 15 (IL15), mRNA |
| NM_004513 | Homo sapiens interleukin 16 (lymphocyte chemoattractant factor) (IL16), |
| | mRNA |
| NM_002190 | Homo sapiens interleukin 17 (cytotoxic T-lymphocyte-associated serine |
| | esterase 8) (IL17), mRNA |
| NM_014443 | Homo sapiens interleukin 17B (IL17B), mRNA |
| NM_013278 | Homo sapiens interleukin 17C (IL17C), mRNA |
| NM_138284 | Homo sapiens interleukin 17D (IL17D), mRNA |
| NM_022789 | Homo sapiens interleukin 17E (IL17E), mRNA |
| NM_052872 | Homo sapiens interleukin 17F (IL17F), mRNA |
| NM_001562 | Homo sapiens interleukin 18 (interferon-gamma-inducing factor) (IL18), |
| | mRNA |
| NM_013371 | Homo sapiens interleukin 19 (IL19), mRNA |
| NM_018724 | Homo sapiens interleukin 20 (IL20), mRNA |
| NM_021803 | Homo sapiens interleukin 21 (IL21 antisense), mRNA |
| NM_020525 | Homo sapiens interleukin 22 (IL22), mRNA |
| NM_016584 | Homo sapiens interleukin 23, alpha subunit p19 (IL23A), mRNA |
| NM_006850 | Homo sapiens interleukin 24 (IL24), mRNA |
| NM_018402 | Homo sapiens interleukin 26 (IL26), mRNA |
| AL365373 | Homo sapiens interleukin 27 (IL27), mRNA |

Interleukin Receptor Family

| | |
|---|---|
| NM_000877 | Homo sapiens interleukin 1 receptor, type I (IL1R1), mRNA |
| NM_004633 | Homo sapiens interleukin 1 receptor, type II (IL1R2), mRNA |
| NM_016232 | Homo sapiens interleukin 1 receptor-like 1 (IL1RL1), mRNA |
| NM_003856 | Homo sapiens interleukin 1 receptor-like 1 (IL1RL1), mRNA |
| NM_003854 | Homo sapiens interleukin 1 receptor-like 2 (IL1RL2), mRNA |
| NM_000417 | Homo sapiens interleukin 2 receptor, alpha (IL2RA), mRNA |
| NM_000878 | Homo sapiens interleukin 2 receptor, beta (IL2RB), mRNA |
| NM_000206 | Homo sapiens interleukin 2 receptor, gamma (severe combined |
| | immunodeficiency) (IL2RG), mRNA |
| NM_002183 | Homo sapiens interleukin 3 receptor, alpha (low affinity) (IL3RA), |
| | mRNA |
| NM_000418 | Homo sapiens interleukin 4 receptor (IL4R), mRNA |
| NM_000564 | Homo sapiens interleukin 5 receptor, alpha (IL5RA), mRNA |
| NM_000565 | Homo sapiens interleukin 6 receptor (IL6R), mRNA |
| NM_002185 | Homo sapiens interleukin 7 receptor (IL7R), mRNA |
| NM_000634 | Homo sapiens interleukin 8 receptor, alpha (IL8RA), mRNA |
| NM_001557 | Homo sapiens interleukin 8 receptor, beta (IL8RB), mRNA |
| NM_002186 | Homo sapiens interleukin 9 receptor (IL9R), mRNA |
| NM_001558 | Homo sapiens interleukin 10 receptor, alpha (IL10RA), mRNA |
| NM_000628 | Homo sapiens interleukin 10 receptor, beta (IL10RB), mRNA |
| NM_004512 | Homo sapiens interleukin 11 receptor, alpha (IL11RA), mRNA |
| NM_005535 | Homo sapiens interleukin 12 receptor, beta 1 (IL12RB1), mRNA |
| NM_001559 | Homo sapiens interleukin 12 receptor, beta 2 (IL12RB2), mRNA |
| NM_001560 | Homo sapiens interleukin 13 receptor, alpha 1 (IL13RA1), mRNA |
| NM_000640 | Homo sapiens interleukin 13 receptor, alpha 2 (IL13RA2), mRNA |
| NM_002189 | Homo sapiens interleukin 15 receptor, alpha (IL15RA), mRNA |
| NM_014339 | Homo sapiens interleukin 17 receptor (IL17R), mRNA |
| NM_032732 | Homo sapiens interleukin 17 receptor C (IL-17RC), mRNA |
| NM_144640 | Homo sapiens interleukin 17 receptor E (IL-17RE), mRNA |
| NM_018725 | Homo sapiens interleukin 17B receptor (IL17BR), mRNA |
| NM_003855 | Homo sapiens interleukin 18 receptor 1 (IL18R1), mRNA |
| NM_003853 | Homo sapiens interleukin 18 receptor accessory protein (IL18RAP), |
| | mRNA |
| NM_014432 | Homo sapiens interleukin 20 receptor, alpha (IL20RA), mRNA |
| NM_021798 | Homo sapiens interleukin 21 receptor (IL21 antisenseR), mRNA |
| NM_021258 | Homo sapiens interleukin 22 receptor (IL22R), mRNA |
| NM_144701 | Homo sapiens interleukin 23 receptor (IL23R), mRNA |

Interleukin Associated Proteins

| | |
|---|---|
| NM_004514 | Homo sapiens interleukin enhancer binding factor 1 (ILF1), mRNA |
| NM_004515 | Homo sapiens interleukin enhancer binding factor 2, 45 kD (ILF2), mRNA |
| NM_012218 | Homo sapiens interleukin enhancer binding factor 3, 90 kD (ILF3), mRNA |
| NM_004516 | Homo sapiens interleukin enhancer binding factor 3, 90 kD (ILF3), mRNA |
| NM_016123 | Homo sapiens interleukin-1 receptor associated kinase 4 (IRAK4), mRNA |
| NM_001569 | Homo sapiens interleukin-1 receptor-associated kinase 1 (IRAK1), |
| | mRNA |
| NM_001570 | Homo sapiens interleukin-1 receptor-associated kinase 2 (IRAK2), |
| | mRNA |
| NM_007199 | Homo sapiens interleukin-1 receptor-associated kinase 3 (IRAK3), |
| | mRNA |
| NM_134470 | Homo sapiens interleukin 1 receptor accessory protein (IL1RAP), mRNA |
| NM_002182 | Homo sapiens interleukin 1 receptor accessory protein (IL1RAP), mRNA |
| NM_014271 | Homo sapiens interleukin 1 receptor accessory protein-like 1 |
| | (IL1RAPL1), mRNA |
| NM_017416 | Homo sapiens interleukin 1 receptor accessory protein-like 2 |
| | (IL1RAPL2), mRNA |
| NM_000577 | Homo sapiens interleukin 1 receptor antagonist (IL1RN), mRNA |
| NM_002184 | Homo sapiens interleukin 6 signal transducer (gp130, oncostatin M |
| | receptor) (IL6ST), mRNA |
| NM_005699 | Homo sapiens interleukin 18 binding protein (IL18BP), mRNA |

TABLE II
Interleukin and Interleukin receptor siNA and Target Sequences

| | | | | | | | | |
|---|---|---|---|---|---|---|---|---|
| | | Seq | | | Seq | | | Seq |
| Pos | Seq | ID | UPos | Upper seq | ID | LPos | Lower seq | ID |

IL2RG NM_000206

| | | | | | | | | |
|---|---|---|---|---|---|---|---|---|
| 3 | AGAGCAAGCGCCAUGUUGA | 1 | 3 | AGAGCAAGCGCCAUGUUGA | 1 | 25 | UCAACAUGGCGCUUGCUCU | 82 |
| 21 | AAGCCAUCAUUACCAUUCA | 2 | 21 | AAGCCAUCAUUACCAUUCA | 2 | 43 | UGAAUGGUAAUGAUGGCUU | 83 |
| 39 | ACAUCCCUCUUAUUCCUGC | 3 | 39 | ACAUCCCUCUUAUUCCUGC | 3 | 61 | GCAGGAAUAAGAGGGAUGU | 84 |
| 57 | CAGCUGCCCCUGCUGGGAG | 4 | 57 | CAGCUGCCCCUGCUGGGAG | 4 | 79 | CUCCCAGCAGGGGCAGCUG | 85 |
| 75 | GUGGGGCUGAACACGACAA | 5 | 75 | GUGGGGCUGAACACGACAA | 5 | 97 | UUGUCGUGUUCAGCCCCAC | 86 |
| 93 | AUUCUGACGCCCAAUGGGA | 6 | 93 | AUUCUGACGCCCAAUGGGA | 6 | 115 | UCCCAUUGGGCGUCAGAAU | 87 |
| 111 | AAUGAAGACACCACAGCUG | 7 | 111 | AAUGAAGACACCACAGCUG | 7 | 133 | CAGCUGUGGUGUCUUCAUU | 88 |
| 129 | GAUUUCUUCCUGACCACUA | 8 | 129 | GAUUUCUUCCUGACCACUA | 8 | 151 | UAGUGGUCAGGAAGAAAUC | 89 |
| 147 | AUGCCCACUGACUCCCUCA | 9 | 147 | AUGCCCACUGACUCCCUCA | 9 | 169 | UGAGGGAGUCAGUGGGCAU | 90 |
| 165 | AGUGUUUCCACUCUGCCCC | 10 | 165 | AGUGUUUCCACUCUGCCCC | 10 | 187 | GGGGCAGAGUGGAAACACU | 91 |
| 183 | CUCCCAGAGGUUCAGUGUU | 11 | 183 | CUCCCAGAGGUUCAGUGUU | 11 | 205 | AACACUGAACCUCUGGGAG | 92 |
| 201 | UUUGUGUUCAAUGUCGAGU | 12 | 201 | UUUGUGUUCAAUGUCGAGU | 12 | 223 | ACUCGACAUUGAACACAAA | 93 |
| 219 | UACAUGAAUUGCACUUGGA | 13 | 219 | UACAUGAAUUGCACUUGGA | 13 | 241 | UCCAAGUGCAAUUCAUGUA | 94 |
| 237 | AACAGCAGCUCUGAGCCCC | 14 | 237 | AACAGCAGCUCUGAGCCCC | 14 | 259 | GGGGCUCAGAGCUGCUGUU | 95 |
| 255 | CAGCCUACCAACCUCACUC | 15 | 255 | CAGCCUACCAACCUCACUC | 15 | 277 | GAGUGAGGUUGGUAGGCUG | 96 |
| 273 | CUGCAUUAUUGGUACAAGA | 16 | 273 | CUGCAUUAUUGGUACAAGA | 16 | 295 | UCUUGUACCAAUAAUGCAG | 97 |
| 291 | AACUCGGAUAAUGAUAAAG | 17 | 291 | AACUCGGAUAAUGAUAAAG | 17 | 313 | CUUUAUCAUUAUCCGAGUU | 98 |
| 309 | GUCCAGAAGUGCAGCCACU | 18 | 309 | GUCCAGAAGUGCAGCCACU | 18 | 331 | AGUGGCUGCACUUCUGGAC | 99 |
| 327 | UAUCUAUUCUCUGAAGAAA | 19 | 327 | UAUCUAUUCUCUGAAGAAA | 19 | 349 | UUUCUUCAGAGAAUAGAUA | 100 |
| 345 | AUCACUUCUGGCUGUCAGU | 20 | 345 | AUCACUUCUGGCUGUCAGU | 20 | 367 | ACUGACAGCCAGAAGUGAU | 101 |
| 363 | UUGCAAAAAAAGGAGAUCC | 21 | 363 | UUGCAAAAAAAGGAGAUCC | 21 | 385 | GGAUCUCCUUUUUUUGCAA | 102 |
| 381 | CACCUCUACCAAACAUUUG | 22 | 381 | CACCUCUACCAAACAUUUG | 22 | 403 | CAAAUGUUUGGUAGAGGUG | 103 |
| 399 | GUUGUUCAGCUCCAGGACC | 23 | 399 | GUUGUUCAGCUCCAGGACC | 23 | 421 | GGUCCUGGAGCUGAACAAC | 104 |
| 417 | CCACGGGAACCCAGGAGAC | 24 | 417 | CCACGGGAACCCAGGAGAC | 24 | 439 | GUCUCCUGGGUUCCCGUGG | 105 |
| 435 | CAGGCCACACAGAUGCUAA | 25 | 435 | CAGGCCACACAGAUGCUAA | 25 | 457 | UUAGCAUCUGUGUGGCCUG | 106 |
| 453 | AAACUGCAGAAUCUGGUGA | 26 | 453 | AAACUGCAGAAUCUGGUGA | 26 | 475 | UCACCAGAUUCUGCAGUUU | 107 |
| 471 | AUCCCCUGGGCUCCAGAGA | 27 | 471 | AUCCCCUGGGCUCCAGAGA | 27 | 493 | UCUCUGGAGCCCAGGGGAU | 108 |
| 489 | AACCUAACACUUCACAAAC | 28 | 489 | AACCUAACACUUCACAAAC | 28 | 511 | GUUUGUGAAGUGUUAGGUU | 109 |
| 507 | CUGAGUGAAUCCCAGCUAG | 29 | 507 | CUGAGUGAAUCCCAGCUAG | 29 | 529 | CUAGCUGGGAUUCACUCAG | 110 |
| 525 | GAACUGAACUGGAACAACA | 30 | 525 | GAACUGAACUGGAACAACA | 30 | 547 | UGUUGUUCCAGUUCAGUUC | 111 |
| 543 | AGAUUCUUGAACCACUGUU | 31 | 543 | AGAUUCUUGAACCACUGUU | 31 | 565 | AACAGUGGUUCAAGAAUCU | 112 |
| 561 | UUGGAGCACUUGGUGCAGU | 32 | 561 | UUGGAGCACUUGGUGCAGU | 32 | 583 | ACUGCACCAAGUGCUCCAA | 113 |
| 579 | UACCGGACUGACUGGGACC | 33 | 579 | UACCGGACUGACUGGGACC | 33 | 601 | GGUCCCAGUCAGUCCGGUA | 114 |
| 597 | CACAGCUGGACUGAACAAU | 34 | 597 | CACAGCUGGACUGAACAAU | 34 | 619 | AUUGUUCAGUCCAGCUGUG | 115 |
| 615 | UCAGUGGAUUAUAGACAUA | 35 | 615 | UCAGUGGAUUAUAGACAUA | 35 | 637 | UAUGUCUAUAAUCCACUGA | 116 |
| 633 | AAGUUCUCCUUGCCUAGUG | 36 | 633 | AAGUUCUCCUUGCCUAGUG | 36 | 655 | CACUAGGCAAGGAGAACUU | 117 |
| 651 | GUGGAUGGGCAGAAACGCU | 37 | 651 | GUGGAUGGGCAGAAACGCU | 37 | 673 | AGCGUUUCUGCCCAUCCAC | 118 |
| 669 | UACACGUUUCGUGUUCGGA | 38 | 669 | UACACGUUUCGUGUUCGGA | 38 | 691 | UCCGAACACGAAACGUGUA | 119 |
| 687 | AGCCGCUUUAACCCACUCU | 39 | 687 | AGCCGCUUUAACCCACUCU | 39 | 709 | AGAGUGGGUUAAAGCGGCU | 120 |
| 705 | UGUGGAAGUGCUCAGCAUU | 40 | 705 | UGUGGAAGUGCUCAGCAUU | 40 | 727 | AAUGCUGAGCACUUCCACA | 121 |
| 723 | UGGAGUGAAUGGAGCCACC | 41 | 723 | UGGAGUGAAUGGAGCCACC | 41 | 745 | GGUGGCUCCAUUCACUCCA | 122 |
| 741 | CCAAUCCACUGGGGGAGCA | 42 | 741 | CCAAUCCACUGGGGGAGCA | 42 | 763 | UGCUCCCCCAGUGGAUUGG | 123 |
| 759 | AAUACUUCAAAAGAGAAUC | 43 | 759 | AAUACUUCAAAAGAGAAUC | 43 | 781 | GAUUCUCUUUUGAAGUAUU | 124 |
| 777 | CCUUUCCUGUUUGCAUUGG | 44 | 777 | CCUUUCCUGUUUGCAUUGG | 44 | 799 | CCAAUGCAAACAGGAAAGG | 125 |
| 795 | GAAGCCGUGGUUAUCUCUG | 45 | 795 | GAAGCCGUGGUUAUCUCUG | 45 | 817 | CAGAGAUAACCACGGCUUC | 126 |
| 813 | GUUGGCUCCAUGGGAUUGA | 46 | 813 | GUUGGCUCCAUGGGAUUGA | 46 | 835 | UCAAUCCCAUGGAGCCAAC | 127 |
| 831 | AUUAUCAGCCUUCUCUGUG | 47 | 831 | AUUAUCAGCCUUCUCUGUG | 47 | 853 | CACAGAGAAGGCUGAUAAU | 128 |
| 849 | GUGUAUUUCUGGCUGGAAC | 48 | 849 | GUGUAUUUCUGGCUGGAAC | 48 | 871 | GUUCCAGCCAGAAAUACAC | 129 |
| 867 | CGGACGAUGCCCCGAAUUC | 49 | 867 | CGGACGAUGCCCCGAAUUC | 49 | 889 | GAAUUCGGGGCAUCGUCCG | 130 |
| 885 | CCCACCCUGAAGAACCUAG | 50 | 885 | CCCACCCUGAAGAACCUAG | 50 | 907 | CUAGGUUCUUCAGGGUGGG | 131 |
| 903 | GAGGAUCUUGUUACUGAAU | 51 | 903 | GAGGAUCUUGUUACUGAAU | 51 | 925 | AUUCAGUAACAAGAUCCUC | 132 |
| 921 | UACCACGGGAACUUUUCGG | 52 | 921 | UACCACGGGAACUUUUCGG | 52 | 943 | CCGAAAAGUUCCCGUGGUA | 133 |
| 939 | GCCUGGAGUGGUGUGUCUA | 53 | 939 | GCCUGGAGUGGUGUGUCUA | 53 | 961 | UAGACACACCACUCCAGGC | 134 |
| 957 | AAGGGACUGGCUGAGAGUC | 54 | 957 | AAGGGACUGGCUGAGAGUC | 54 | 979 | GACUCUCAGCCAGUCCCUU | 135 |
| 975 | CUGCAGCCAGACUACAGUG | 55 | 975 | CUGCAGCCAGACUACAGUG | 55 | 997 | CACUGUAGUCUGGCUGCAG | 136 |
| 993 | GAACGACUCUGCCUCGUCA | 56 | 993 | GAACGACUCUGCCUCGUCA | 56 | 1015 | UGACGAGGCAGAGUCGUUC | 137 |
| 1011 | AGUGAGAUUCCCCCAAAAG | 57 | 1011 | AGUGAGAUUCCCCCAAAAG | 57 | 1033 | CUUUUGGGGGAAUCUCACU | 138 |
| 1029 | GGAGGGGCCCUUGGGGAGG | 58 | 1029 | GGAGGGGCCCUUGGGGAGG | 58 | 1051 | CCUCCCCAAGGGCCCCUCC | 139 |
| 1047 | GGGCCUGGGGCCUCCCCAU | 59 | 1047 | GGGCCUGGGGCCUCCCCAU | 59 | 1069 | AUGGGGAGGCCCCAGGCCC | 140 |
| 1065 | UGCAACCAGCAUAGCCCCU | 60 | 1065 | UGCAACCAGCAUAGCCCCU | 60 | 1087 | AGGGGCUAUGCUGGUUGCA | 141 |
| 1083 | UACUGGGCCCCCCCAUGUU | 61 | 1083 | UACUGGGCCCCCCCAUGUU | 61 | 1105 | AACAUGGGGGGGCCCAGUA | 142 |
| 1101 | UACACCCUAAAGCCUGAAA | 62 | 1101 | UACACCCUAAAGCCUGAAA | 62 | 1123 | UUUCAGGCUUUAGGGUGUA | 143 |
| 1119 | ACCUGAACCCCAAUCCUCU | 63 | 1119 | ACCUGAACCCCAAUCCUCU | 63 | 1141 | AGAGGAUUGGGGUUCAGGU | 144 |
| 1137 | UGACAGAAGAACCCCAGGG | 64 | 1137 | UGACAGAAGAACCCCAGGG | 64 | 1159 | CCCUGGGGUUCUUCUGUCA | 145 |
| 1155 | GUCCUGUAGCCCUAAGUGG | 65 | 1155 | GUCCUGUAGCCCUAAGUGG | 65 | 1177 | CCACUUAGGGCUACAGGAC | 146 |
| 1173 | GUACUAACUUUCCUUCAUU | 66 | 1173 | GUACUAACUUUCCUUCAUU | 66 | 1195 | AAUGAAGGAAAGUUAGUAC | 147 |
| 1191 | UCAACCCACCUGCGUCUCA | 67 | 1191 | UCAACCCACCUGCGUCUCA | 67 | 1213 | UGAGACGCAGGUGGGUUGA | 148 |
| 1209 | AUACUCACCUCACCCCACU | 68 | 1209 | AUACUCACCUCACCCCACU | 68 | 1231 | AGUGGGGUGAGGUGAGUAU | 149 |
| 1227 | UGUGGCUGAUUUGGAAUUU | 69 | 1227 | UGUGGCUGAUUUGGAAUUU | 69 | 1249 | AAAUUCCAAAUCAGCCACA | 150 |
| 1245 | UUGUGCCCCCAUGUAAGCA | 70 | 1245 | UUGUGCCCCCAUGUAAGCA | 70 | 1267 | UGCUUACAUGGGGGCACAA | 151 |
| 1263 | ACCCCUUCAUUUGGCAUUC | 71 | 1263 | ACCCCUUCAUUUGGCAUUC | 71 | 1285 | GAAUGCCAAAUGAAGGGGU | 152 |
| 1281 | CCCCACUUGAGAAUUACCC | 72 | 1281 | CCCCACUUGAGAAUUACCC | 72 | 1303 | GGGUAAUUCUCAAGUGGGG | 153 |
| 1299 | CUUUUGCCCCGAACAUGUU | 73 | 1299 | CUUUUGCCCCGAACAUGUU | 73 | 1321 | AACAUGUUCGGGGCAAAAG | 154 |
| 1317 | UUUUCUUCUCCCUCAGUCU | 74 | 1317 | UUUUCUUCUCCCUCAGUCU | 74 | 1339 | AGACUGAGGGAGAAGAAAA | 155 |
| 1335 | UGGCCCUUCCUUUUCGCAG | 75 | 1335 | UGGCCCUUCCUUUUCGCAG | 75 | 1357 | CUGCGAAAAGGAAGGGCCA | 156 |
| 1353 | GGAUUCUUCCUCCCUCCCU | 76 | 1353 | GGAUUCUUCCUCCCUCCCU | 76 | 1375 | AGGGAGGGAGGAAGAAUCC | 157 |
| 1371 | UCUUUCCCUCCCUUCCUCU | 77 | 1371 | UCUUUCCCUCCCUUCCUCU | 77 | 1393 | AGAGGAAGGGAGGGAAAGA | 158 |
| 1389 | UUUCCAUCUACCCUCCGAU | 78 | 1389 | UUUCCAUCUACCCUCCGAU | 78 | 1411 | AUCGGAGGGUAGAUGGAAA | 159 |
| 1407 | UUGUUCCUGAACCGAUGAG | 79 | 1407 | UUGUUCCUGAACCGAUGAG | 79 | 1429 | CUCAUCGGUUCAGGAACAA | 160 |
| 1425 | GAAAUAAAGUUUCUGUUGA | 80 | 1425 | GAAAUAAAGUUUCUGUUGA | 80 | 1447 | UCAACAGAAACUUUAUUUC | 161 |
| 1431 | AAGUUUCUGUUGAUAAUCA | 81 | 1431 | AAGUUUCUGUUGAUAAUCA | 81 | 1453 | UGAUUAUCAACAGAAACUU | 162 |

IL4 NM_000589

| | | | | | | | | |
|---|---|---|---|---|---|---|---|---|
| 3 | CUAUGCAAAGCAAAAAGCC | 163 | 3 | CUAUGCAAAGCAAAAAGCC | 163 | 25 | GGCUUUUUGCUUUGCAUAG | 214 |
| 21 | CAGCAGCAGCCCCAAGCUG | 164 | 21 | CAGCAGCAGCCCCAAGCUG | 164 | 43 | CAGCUUGGGGCUGCUGCUG | 215 |
| 39 | GAUAAGAUUAAUCUAAAGA | 165 | 39 | GAUAAGAUUAAUCUAAAGA | 165 | 61 | UCUUUAGAUUAAUCUUAUC | 216 |
| 57 | AGCAAAUUAUGGUGUAAUU | 166 | 57 | AGCAAAUUAUGGUGUAAUU | 166 | 79 | AAUUACACCAUAAUUUGCU | 217 |
| 75 | UUCCUAUGCUGAAACUUUG | 167 | 75 | UUCCUAUGCUGAAACUUUG | 167 | 97 | CAAAGUUUCAGCAUAGGAA | 218 |
| 93 | GUAGUUAAUUUUUUAAAAA | 168 | 93 | GUAGUUAAUUUUUUAAAAA | 168 | 115 | UUUUUAAAAAAUUAACUAC | 219 |
| 111 | AGGUUUCAUUUUCCUAUUG | 169 | 111 | AGGUUUCAUUUUCCUAUUG | 169 | 133 | CAAUAGGAAAAUGAAACCU | 220 |
| 129 | GGUCUGAUUUCACAGGAAC | 170 | 129 | GGUCUGAUUUCACAGGAAC | 170 | 151 | GUUCCUGUGAAAUCAGACC | 221 |
| 147 | CAUUUUACCUGUUUGUGAG | 171 | 147 | CAUUUUACCUGUUUGUGAG | 171 | 169 | CUCACAAACAGGUAAAAUG | 222 |
| 165 | GGCAUUUUUUCUCCUGGAA | 172 | 165 | GGCAUUUUUUCUCCUGGAA | 172 | 187 | UUCCAGGAGAAAAAAUGCC | 223 |
| 183 | AGAGAGGUGCUGAUUGGCC | 173 | 183 | AGAGAGGUGCUGAUUGGCC | 173 | 205 | GGCCAAUCAGCACCUCUCU | 224 |
| 201 | CCCAAGUGACUGACAAUCU | 174 | 201 | CCCAAGUGACUGACAAUCU | 174 | 223 | AGAUUGUCAGUCACUUGGG | 225 |
| 219 | UGGUGUAACGAAAAUUUCC | 175 | 219 | UGGUGUAACGAAAAUUUCC | 175 | 241 | GGAAAUUUUCGUUACACCA | 226 |
| 237 | CAAUGUAAACUCAUUUUCC | 176 | 237 | CAAUGUAAACUCAUUUUCC | 176 | 259 | GGAAAAUGAGUUUACAUUG | 227 |
| 255 | CCUCGGUUUCAGCAAUUUU | 177 | 255 | CCUCGGUUUCAGCAAUUUU | 177 | 277 | AAAAUUGCUGAAACCGAGG | 228 |
| 273 | UAAAUCUAUAUAUAGAGAU | 178 | 273 | UAAAUCUAUAUAUAGAGAU | 178 | 295 | AUCUCUAUAUAUAGAUUUA | 229 |
| 291 | UAUCUUUGUCAGCAUUGCA | 179 | 291 | UAUCUUUGUCAGCAUUGCA | 179 | 313 | UGCAAUGCUGACAAAGAUA | 230 |
| 309 | AUCGUUAGCUUCUCCUGAU | 180 | 309 | AUCGUUAGCUUCUCCUGAU | 180 | 331 | AUCAGGAGAAGCUAACGAU | 231 |
| 327 | UAAACUAAUUGCCUCACAU | 181 | 327 | UAAACUAAUUGCCUCACAU | 181 | 349 | AUGUGAGGCAAUUAGUUUA | 232 |
| 345 | UUGUCACUGCAAAUCGACA | 182 | 345 | UUGUCACUGCAAAUCGACA | 182 | 367 | UGUCGAUUUGCAGUGACAA | 233 |
| 363 | ACCUAUUAAUGGGUCUCAC | 183 | 363 | ACCUAUUAAUGGGUCUCAC | 183 | 385 | GUGAGACCCAUUAAUAGGU | 234 |
| 381 | CCUCCCAACUGCUUCCCCC | 184 | 381 | CCUCCCAACUGCUUCCCCC | 184 | 403 | GGGGGAAGCAGUUGGGAGG | 235 |
| 399 | CUCUGUUCUUCCUGCUAGC | 185 | 399 | CUCUGUUCUUCCUGCUAGC | 185 | 421 | GCUAGCAGGAAGAACAGAG | 236 |
| 417 | CAUGUGCCGGCAACUUUGU | 186 | 417 | CAUGUGCCGGCAACUUUGU | 186 | 439 | ACAAAGUUGCCGGCACAUG | 237 |
| 435 | UCCACGGACACAAGUGCGA | 187 | 435 | UCCACGGACACAAGUGCGA | 187 | 457 | UCGCACUUGUGUCCGUGGA | 238 |
| 453 | AUAUCACCUUACAGGAGAU | 188 | 453 | AUAUCACCUUACAGGAGAU | 188 | 475 | AUCUCCUGUAAGGUGAUAU | 239 |
| 471 | UCAUCAAAACUUUGAACAG | 189 | 471 | UCAUCAAAACUUUGAACAG | 189 | 493 | CUGUUCAAAGUUUUGAUGA | 240 |
| 489 | GCCUCACAGAGCAGAAGAC | 190 | 489 | GCCUCACAGAGCAGAAGAC | 190 | 511 | GUCUUCUGCUCUGUGAGGC | 241 |
| 507 | CUCUGUGCACCGAGUUGAC | 191 | 507 | CUCUGUGCACCGAGUUGAC | 191 | 529 | GUCAACUCGGUGCACAGAG | 242 |
| 525 | CCGUAACAGACAUCUUUGC | 192 | 525 | CCGUAACAGACAUCUUUGC | 192 | 547 | GCAAAGAUGUCUGUUACGG | 243 |
| 543 | CUGCCUCCAAGAACACAAC | 193 | 543 | CUGCCUCCAAGAACACAAC | 193 | 565 | GUUGUGUUCUUGGAGGCAG | 244 |
| 561 | CUGAGAAGGAAACCUUCUG | 194 | 561 | CUGAGAAGGAAACCUUCUG | 194 | 583 | CAGAAGGUUUCCUUCUCAG | 245 |
| 579 | GCAGGGCUGCGACUGUGCU | 195 | 579 | GCAGGGCUGCGACUGUGCU | 195 | 601 | AGCACAGUCGCAGCCCUGC | 246 |
| 597 | UCCGGCAGUUCUACAGCCA | 196 | 597 | UCCGGCAGUUCUACAGCCA | 196 | 619 | UGGCUGUAGAACUGCCGGA | 247 |
| 615 | ACCAUGAGAAGGACACUCG | 197 | 615 | ACCAUGAGAAGGACACUCG | 197 | 637 | CGAGUGUCCUUCUCAUGGU | 248 |
| 633 | GCUGCCUGGGUGCGACUGC | 198 | 633 | GCUGCCUGGGUGCGACUGC | 198 | 655 | GCAGUCGCACCCAGGCAGC | 249 |
| 651 | CACAGCAGUUCCACAGGCA | 199 | 651 | CACAGCAGUUCCACAGGCA | 199 | 673 | UGCCUGUGGAACUGCUGUG | 250 |
| 669 | ACAAGCAGCUGAUCCGAUU | 200 | 669 | ACAAGCAGCUGAUCCGAUU | 200 | 691 | AAUCGGAUCAGCUGCUUGU | 251 |
| 687 | UCCUGAAACGGCUCGACAG | 201 | 687 | UCCUGAAACGGCUCGACAG | 201 | 709 | CUGUCGAGCCGUUUCAGGA | 252 |
| 705 | GGAACCUCUGGGGCCUGGC | 202 | 705 | GGAACCUCUGGGGCCUGGC | 202 | 727 | GCCAGGCCCCAGAGGUUCC | 253 |
| 723 | CGGGCUUGAAUUCCUGUCC | 203 | 723 | CGGGCUUGAAUUCCUGUCC | 203 | 745 | GGACAGGAAUUCAAGCCCG | 254 |
| 741 | CUGUGAAGGAAGCCAACCA | 204 | 741 | CUGUGAAGGAAGCCAACCA | 204 | 763 | UGGUUGGCUUCCUUCACAG | 255 |
| 759 | AGAGUACGUUGGAAAACUU | 205 | 759 | AGAGUACGUUGGAAAACUU | 205 | 781 | AAGUUUUCCAACGUACUCU | 256 |
| 777 | UCUUGGAAAGGCUAAAGAC | 206 | 777 | UCUUGGAAAGGCUAAAGAC | 206 | 799 | GUCUUUAGCCUUUCCAAGA | 257 |
| 795 | CGAUCAUGAGAGAGAAAUA | 207 | 795 | CGAUCAUGAGAGAGAAAUA | 207 | 817 | UAUUUCUCUCUCAUGAUCG | 258 |
| 813 | AUUCAAAGUGUUCGAGCUG | 208 | 813 | AUUCAAAGUGUUCGAGCUG | 208 | 835 | CAGCUCGAACACUUUGAAU | 259 |
| 831 | GAAUAUUUUAAUUUAUGAG | 209 | 831 | GAAUAUUUUAAUUUAUGAG | 209 | 853 | CUCAUAAAUUAAAAUAUUC | 260 |
| 849 | GUUUUUGAUAGCUUUAUUU | 210 | 849 | GUUUUUGAUAGCUUUAUUU | 210 | 871 | AAAUAAAGCUAUCAAAAAC | 261 |
| 867 | UUUUAAGUAUUUAUAUAUU | 211 | 867 | UUUUAAGUAUUUAUAUAUU | 211 | 889 | AAUAUAUAAAUACUUAAAA | 262 |
| 885 | UUAUAACUCAUCAUAAAAU | 212 | 885 | UUAUAACUCAUCAUAAAAU | 212 | 907 | AUUUUAUGAUGAGUUAUAA | 263 |
| 901 | AAUAAAGUAUAUAUAGAAU | 213 | 901 | AAUAAAGUAUAUAUAGAAU | 213 | 923 | AUUCUAUAUAUACUUUAUU | 264 |

IL4R NM_000418

| | | | | | | | | |
|---|---|---|---|---|---|---|---|---|
| 3 | CGAAUGGAGCAGGGGCGCG | 265 | 3 | CGAAUGGAGCAGGGGCGCG | 265 | 25 | CGCGCCCCUGCUCCAUUCG | 465 |
| 21 | GCAGAUAAUUAAAGAUUUA | 266 | 21 | GCAGAUAAUUAAAGAUUUA | 266 | 43 | UAAAUCUUUAAUUAUCUGC | 466 |
| 39 | ACACACAGCUGGAAGAAAU | 267 | 39 | ACACACAGCUGGAAGAAAU | 267 | 61 | AUUUCUUCCAGCUGUGUGU | 467 |
| 57 | UCAUAGAGAAGCCGGGCGU | 268 | 57 | UCAUAGAGAAGCCGGGCGU | 268 | 79 | ACGCCCGGCUUCUCUAUGA | 468 |
| 75 | UGGUGGCUCAUGCCUAUAA | 269 | 75 | UGGUGGCUCAUGCCUAUAA | 269 | 97 | UUAUAGGCAUGAGCCACCA | 469 |
| 93 | AUCCCAGCACUUUUGGAGG | 270 | 93 | AUCCCAGCACUUUUGGAGG | 270 | 115 | CCUCCAAAAGUGCUGGGAU | 470 |
| 111 | GCUGAGGCGGGCAGAUCAC | 271 | 111 | GCUGAGGCGGGCAGAUCAC | 271 | 133 | GUGAUCUGCCCGCCUCAGC | 471 |
| 129 | CUUGAGAUCAGGAGUUCGA | 272 | 129 | CUUGAGAUCAGGAGUUCGA | 272 | 151 | UCGAACUCCUGAUCUCAAG | 472 |
| 147 | AGACCAGCCUGGUGCCUUG | 273 | 147 | AGACCAGCCUGGUGCCUUG | 273 | 169 | CAAGGCACCAGGCUGGUCU | 473 |
| 165 | GGCAUCUCCCAAUGGGGUG | 274 | 165 | GGCAUCUCCCAAUGGGGUG | 274 | 187 | CACCCCAUUGGGAGAUGCC | 474 |
| 183 | GGCUUUGCUCUGGGCUCCU | 275 | 183 | GGCUUUGCUCUGGGCUCCU | 275 | 205 | AGGAGCCCAGAGCAAAGCC | 475 |
| 201 | UGUUCCCUGUGAGCUGCCU | 276 | 201 | UGUUCCCUGUGAGCUGCCU | 276 | 223 | AGGCAGCUCACAGGGAACA | 476 |
| 219 | UGGUCCUGCUGCAGGUGGC | 277 | 219 | UGGUCCUGCUGCAGGUGGC | 277 | 241 | GCCACCUGCAGCAGGACCA | 477 |
| 237 | CAAGCUCUGGGAACAUGAA | 278 | 237 | CAAGCUCUGGGAACAUGAA | 278 | 259 | UUCAUGUUCCCAGAGCUUG | 478 |
| 255 | AGGUCUUGCAGGAGCCCAC | 279 | 255 | AGGUCUUGCAGGAGCCCAC | 279 | 277 | GUGGGCUCCUGCAAGACCU | 479 |
| 273 | CCUGCGUCUCCGACUACAU | 280 | 273 | CCUGCGUCUCCGACUACAU | 280 | 295 | AUGUAGUCGGAGACGCAGG | 480 |
| 291 | UGAGCAUCUCUACUUGCGA | 281 | 291 | UGAGCAUCUCUACUUGCGA | 281 | 313 | UCGCAAGUAGAGAUGCUCA | 481 |
| 309 | AGUGGAAGAUGAAUGGUCC | 282 | 309 | AGUGGAAGAUGAAUGGUCC | 282 | 331 | GGACCAUUCAUCUUCCACU | 482 |
| 327 | CCACCAAUUGCAGCACCGA | 283 | 327 | CCACCAAUUGCAGCACCGA | 283 | 349 | UCGGUGCUGCAAUUGGUGG | 483 |
| 345 | AGCUCCGCCUGUUGUACCA | 284 | 345 | AGCUCCGCCUGUUGUACCA | 284 | 367 | UGGUACAACAGGCGGAGCU | 484 |
| 363 | AGCUGGUUUUUCUGCUCUC | 285 | 363 | AGCUGGUUUUUCUGCUCUC | 285 | 385 | GAGAGCAGAAAAACCAGCU | 485 |
| 381 | CCGAAGCCCACACGUGUAU | 286 | 381 | CCGAAGCCCACACGUGUAU | 286 | 403 | AUACACGUGUGGGCUUCGG | 486 |
| 399 | UCCCUGAGAACAACGGAGG | 287 | 399 | UCCCUGAGAACAACGGAGG | 287 | 421 | CCUCCGUUGUUCUCAGGGA | 487 |
| 417 | GCGCGGGGUGCGUGUGCCA | 288 | 417 | GCGCGGGGUGCGUGUGCCA | 288 | 439 | UGGCACACGCACCCCGCGC | 488 |
| 435 | ACCUGCUCAUGGAUGACGU | 289 | 435 | ACCUGCUCAUGGAUGACGU | 289 | 457 | ACGUCAUCCAUGAGCAGGU | 489 |
| 453 | UGGUCAGUGCGGAUAACUA | 290 | 453 | UGGUCAGUGCGGAUAACUA | 290 | 475 | UAGUUAUCCGCACUGACCA | 490 |
| 471 | AUACACUGGACCUGUGGGC | 291 | 471 | AUACACUGGACCUGUGGGC | 291 | 493 | GCCCACAGGUCCAGUGUAU | 491 |
| 489 | CUGGGCAGCAGCUGCUGUG | 292 | 489 | CUGGGCAGCAGCUGCUGUG | 292 | 511 | CACAGCAGCUGCUGCCCAG | 492 |
| 507 | GGAAGGGCUCCUUCAAGCC | 293 | 507 | GGAAGGGCUCCUUCAAGCC | 293 | 529 | GGCUUGAAGGAGCCCUUCC | 493 |
| 525 | CCAGCGAGCAUGUGAAACC | 294 | 525 | CCAGCGAGCAUGUGAAACC | 294 | 547 | GGUUUCACAUGCUCGCUGG | 494 |
| 543 | CCAGGGCCCCAGGAAACCU | 295 | 543 | CCAGGGCCCCAGGAAACCU | 295 | 565 | AGGUUUCCUGGGGCCCUGG | 495 |
| 561 | UGACAGUUCACACCAAUGU | 296 | 561 | UGACAGUUCACACCAAUGU | 296 | 583 | ACAUUGGUGUGAACUGUCA | 496 |
| 579 | UCUCCGACACUCUGCUGCU | 297 | 579 | UCUCCGACACUCUGCUGCU | 297 | 601 | AGCAGCAGAGUGUCGGAGA | 497 |
| 597 | UGACCUGGAGCAACCCGUA | 298 | 597 | UGACCUGGAGCAACCCGUA | 298 | 619 | UACGGGUUGCUCCAGGUCA | 498 |
| 615 | AUCCCCCUGACAAUUACCU | 299 | 615 | AUCCCCCUGACAAUUACCU | 299 | 637 | AGGUAAUUGUCAGGGGGAU | 499 |
| 633 | UGUAUAAUCAUCUCACCUA | 300 | 633 | UGUAUAAUCAUCUCACCUA | 300 | 655 | UAGGUGAGAUGAUUAUACA | 500 |
| 651 | AUGCAGUCAACAUUUGGAG | 301 | 651 | AUGCAGUCAACAUUUGGAG | 301 | 673 | CUCCAAAUGUUGACUGCAU | 501 |
| 669 | GUGAAAACGACCCGGCAGA | 302 | 669 | GUGAAAACGACCCGGCAGA | 302 | 691 | UCUGCCGGGUCGUUUUCAC | 502 |
| 687 | AUUUCAGAAUCUAUAACGU | 303 | 687 | AUUUCAGAAUCUAUAACGU | 303 | 709 | ACGUUAUAGAUUCUGAAAU | 503 |
| 705 | UGACCUACCUAGAACCCUC | 304 | 705 | UGACCUACCUAGAACCCUC | 304 | 727 | GAGGGUUCUAGGUAGGUCA | 504 |
| 723 | CCCUCCGCAUCGCAGCCAG | 305 | 723 | CCCUCCGCAUCGCAGCCAG | 305 | 745 | CUGGCUGCGAUGCGGAGGG | 505 |
| 741 | GCACCCUGAAGUCUGGGAU | 306 | 741 | GCACCCUGAAGUCUGGGAU | 306 | 763 | AUCCCAGACUUCAGGGUGC | 506 |
| 759 | UUUCCUACAGGGCACGGGU | 307 | 759 | UUUCCUACAGGGCACGGGU | 307 | 781 | ACCCGUGCCCUGUAGGAAA | 507 |
| 777 | UGAGGGCCUGGGCUCAGUG | 308 | 777 | UGAGGGCCUGGGCUCAGUG | 308 | 799 | CACUGAGCCCAGGCCCUCA | 508 |
| 795 | GCUAUAACACCACCUGGAG | 309 | 795 | GCUAUAACACCACCUGGAG | 309 | 817 | CUCCAGGUGGUGUUAUAGC | 509 |
| 813 | GUGAGUGGAGCCCCAGCAC | 310 | 813 | GUGAGUGGAGCCCCAGCAC | 310 | 835 | GUGCUGGGGCUCCACUCAC | 510 |
| 831 | CCAAGUGGCACAACUCCUA | 311 | 831 | CCAAGUGGCACAACUCCUA | 311 | 853 | UAGGAGUUGUGCCACUUGG | 511 |
| 849 | ACAGGGAGCCCUUCGAGCA | 312 | 849 | ACAGGGAGCCCUUCGAGCA | 312 | 871 | UGCUCGAAGGGCUCCCUGU | 512 |
| 867 | AGCACCUCCUGCUGGGCGU | 313 | 867 | AGCACCUCCUGCUGGGCGU | 313 | 889 | ACGCCCAGCAGGAGGUGCU | 513 |
| 885 | UCAGCGUUUCCUGCAUUGU | 314 | 885 | UCAGCGUUUCCUGCAUUGU | 314 | 907 | ACAAUGCAGGAAACGCUGA | 514 |
| 903 | UCAUCCUGGCCGUCUGCCU | 315 | 903 | UCAUCCUGGCCGUCUGCCU | 315 | 925 | AGGCAGACGGCCAGGAUGA | 515 |
| 921 | UGUUGUGCUAUGUCAGCAU | 316 | 921 | UGUUGUGCUAUGUCAGCAU | 316 | 943 | AUGCUGACAUAGCACAACA | 516 |
| 939 | UCACCAAGAUUAAGAAAGA | 317 | 939 | UCACCAAGAUUAAGAAAGA | 317 | 961 | UCUUUCUUAAUCUUGGUGA | 517 |
| 957 | AAUGGUGGGAUCAGAUUCC | 318 | 957 | AAUGGUGGGAUCAGAUUCC | 318 | 979 | GGAAUCUGAUCCCACCAUU | 518 |
| 975 | CCAACCCAGCCCGCAGCCG | 319 | 975 | CCAACCCAGCCCGCAGCCG | 319 | 997 | CGGCUGCGGGCUGGGUUGG | 519 |
| 993 | GCCUCGUGGCUAUAAUAAU | 320 | 993 | GCCUCGUGGCUAUAAUAAU | 320 | 1015 | AUUAUUAUAGCCACGAGGC | 520 |
| 1011 | UCCAGGAUGCUCAGGGGUC | 321 | 1011 | UCCAGGAUGCUCAGGGGUC | 321 | 1033 | GACCCCUGAGCAUCCUGGA | 521 |
| 1029 | CACAGUGGGAGAAGCGGUC | 322 | 1029 | CACAGUGGGAGAAGCGGUC | 322 | 1051 | GACCGCUUCUCCCACUGUG | 522 |
| 1047 | CCCGAGGCCAGGAACCAGC | 323 | 1047 | CCCGAGGCCAGGAACCAGC | 323 | 1069 | GCUGGUUCCUGGCCUCGGG | 523 |
| 1065 | CCAAGUGCCCACACUGGAA | 324 | 1065 | CCAAGUGCCCACACUGGAA | 324 | 1087 | UUCCAGUGUGGGCACUUGG | 524 |
| 1083 | AGAAUUGUCUUACCAAGCU | 325 | 1083 | AGAAUUGUCUUACCAAGCU | 325 | 1105 | AGCUUGGUAAGACAAUUCU | 525 |
| 1101 | UCUUGCCCUGUUUUCUGGA | 326 | 1101 | UCUUGCCCUGUUUUCUGGA | 326 | 1123 | UCCAGAAAACAGGGCAAGA | 526 |
| 1119 | AGCACAACAUGAAAAGGGA | 327 | 1119 | AGCACAACAUGAAAAGGGA | 327 | 1141 | UCCCUUUUCAUGUUGUGCU | 527 |
| 1137 | AUGAAGAUCCUCACAAGGC | 328 | 1137 | AUGAAGAUCCUCACAAGGC | 328 | 1159 | GCCUUGUGAGGAUCUUCAU | 528 |
| 1155 | CUGCCAAAGAGAUGCCUUU | 329 | 1155 | CUGCCAAAGAGAUGCCUUU | 329 | 1177 | AAAGGCAUCUCUUUGGCAG | 529 |
| 1173 | UCCAGGGCUCUGGAAAAUC | 330 | 1173 | UCCAGGGCUCUGGAAAAUC | 330 | 1195 | GAUUUUCCAGAGCCCUGGA | 530 |
| 1191 | CAGCAUGGUGCCCAGUGGA | 331 | 1191 | CAGCAUGGUGCCCAGUGGA | 331 | 1213 | UCCACUGGGCACCAUGCUG | 531 |
| 1209 | AGAUCAGCAAGACAGUCCU | 332 | 1209 | AGAUCAGCAAGACAGUCCU | 332 | 1231 | AGGACUGUCUUGCUGAUCU | 532 |
| 1227 | UCUGGCCAGAGAGCAUCAG | 333 | 1227 | UCUGGCCAGAGAGCAUCAG | 333 | 1249 | CUGAUGCUCUCUGGCCAGA | 533 |
| 1245 | GCGUGGUGCGAUGUGUGGA | 334 | 1245 | GCGUGGUGCGAUGUGUGGA | 334 | 1267 | UCCACACAUCGCACCACGC | 534 |
| 1263 | AGUUGUUUGAGGCCCCGGU | 335 | 1263 | AGUUGUUUGAGGCCCCGGU | 335 | 1285 | ACCGGGGCCUCAAACAACU | 535 |
| 1281 | UGGAGUGUGAGGAGGAGGA | 336 | 1281 | UGGAGUGUGAGGAGGAGGA | 336 | 1303 | UCCUCCUCCUCACACUCCA | 536 |
| 1299 | AGGAGGUAGAGGAAGAAAA | 337 | 1299 | AGGAGGUAGAGGAAGAAAA | 337 | 1321 | UUUUCUUCCUCUACCUCCU | 537 |
| 1317 | AAGGGAGCUUCUGUGCAUC | 338 | 1317 | AAGGGAGCUUCUGUGCAUC | 338 | 1339 | GAUGCACAGAAGCUCCCUU | 538 |
| 1335 | CGCCUGAGAGCAGCAGGGA | 339 | 1335 | CGCCUGAGAGCAGCAGGGA | 339 | 1357 | UCCCUGCUGCUCUCAGGCG | 539 |
| 1353 | AUGACUUCCAGGAGGGAAG | 340 | 1353 | AUGACUUCCAGGAGGGAAG | 340 | 1375 | CUUCCCUCCUGGAAGUCAU | 540 |
| 1371 | GGGAGGGCAUUGUGGCCCG | 341 | 1371 | GGGAGGGCAUUGUGGCCCG | 341 | 1393 | CGGGCCACAAUGCCCUCCC | 541 |
| 1389 | GGCUAACAGAGAGCCUGUU | 342 | 1389 | GGCUAACAGAGAGCCUGUU | 342 | 1411 | AACAGGCUCUCUGUUAGCC | 542 |
| 1407 | UCCUGGACCUGCUCGGAGA | 343 | 1407 | UCCUGGACCUGCUCGGAGA | 343 | 1429 | UCUCCGAGCAGGUCCAGGA | 543 |
| 1425 | AGGAGAAUGGGGGCUUUUG | 344 | 1425 | AGGAGAAUGGGGGCUUUUG | 344 | 1447 | CAAAAGCCCCCAUUCUCCU | 544 |
| 1443 | GCCAGCAGGACAUGGGGGA | 345 | 1443 | GCCAGCAGGACAUGGGGGA | 345 | 1465 | UCCCCCAUGUCCUGCUGGC | 545 |
| 1461 | AGUCAUGCCUUCUUCCACC | 346 | 1461 | AGUCAUGCCUUCUUCCACC | 346 | 1483 | GGUGGAAGAAGGCAUGACU | 546 |
| 1479 | CUUCGGGAAGUACGAGUGC | 347 | 1479 | CUUCGGGAAGUACGAGUGC | 347 | 1501 | GCACUCGUACUUCCCGAAG | 547 |
| 1497 | CUCACAUGCCCUGGGAUGA | 348 | 1497 | CUCACAUGCCCUGGGAUGA | 348 | 1519 | UCAUCCCAGGGCAUGUGAG | 548 |
| 1515 | AGUUCCCAAGUGCAGGGCC | 349 | 1515 | AGUUCCCAAGUGCAGGGCC | 349 | 1537 | GGCCCUGCACUUGGGAACU | 549 |
| 1533 | CCAAGGAGGCACCUCCCUG | 350 | 1533 | CCAAGGAGGCACCUCCCUG | 350 | 1555 | CAGGGAGGUGCCUCCUUGG | 550 |
| 1551 | GGGGCAAGGAGCAGCCUCU | 351 | 1551 | GGGGCAAGGAGCAGCCUCU | 351 | 1573 | AGAGGCUGCUCCUUGCCCC | 551 |
| 1569 | UCCACCUGGAGCCAAGUCC | 352 | 1569 | UCCACCUGGAGCCAAGUCC | 352 | 1591 | GGACUUGGCUCCAGGUGGA | 552 |
| 1587 | CUCCUGCCAGCCCGACCCA | 353 | 1587 | CUCCUGCCAGCCCGACCCA | 353 | 1609 | UGGGUCGGGCUGGCAGGAG | 553 |
| 1605 | AGAGUCCAGACAACCUGAC | 354 | 1605 | AGAGUCCAGACAACCUGAC | 354 | 1627 | GUCAGGUUGUCUGGACUCU | 554 |
| 1623 | CUUGCACAGAGACGCCCCU | 355 | 1623 | CUUGCACAGAGACGCCCCU | 355 | 1645 | AGGGGCGUCUCUGUGCAAG | 555 |
| 1641 | UCGUCAUCGCAGGCAACCC | 356 | 1641 | UCGUCAUCGCAGGCAACCC | 356 | 1663 | GGGUUGCCUGCGAUGACGA | 556 |
| 1659 | CUGCUUACCGCAGCUUCAG | 357 | 1659 | CUGCUUACCGCAGCUUCAG | 357 | 1681 | CUGAAGCUGCGGUAAGCAG | 557 |
| 1677 | GCAACUCCCUGAGCCAGUC | 358 | 1677 | GCAACUCCCUGAGCCAGUC | 358 | 1699 | GACUGGCUCAGGGAGUUGC | 558 |
| 1695 | CACCGUGUCCCAGAGAGCU | 359 | 1695 | CACCGUGUCCCAGAGAGCU | 359 | 1717 | AGCUCUCUGGGACACGGUG | 559 |
| 1713 | UGGGUCCAGACCCACUGCU | 360 | 1713 | UGGGUCCAGACCCACUGCU | 360 | 1735 | AGCAGUGGGUCUGGACCCA | 560 |
| 1731 | UGGCCAGACACCUGGAGGA | 361 | 1731 | UGGCCAGACACCUGGAGGA | 361 | 1753 | UCCUCCAGGUGUCUGGCCA | 561 |
| 1749 | AAGUAGAACCCGAGAUGCC | 362 | 1749 | AAGUAGAACCCGAGAUGCC | 362 | 1771 | GGCAUCUCGGGUUCUACUU | 562 |
| 1767 | CCUGUGUCCCCCAGCUCUC | 363 | 1767 | CCUGUGUCCCCCAGCUCUC | 363 | 1789 | GAGAGCUGGGGGACACAGG | 563 |
| 1785 | CUGAGCCAACCACUGUGCC | 364 | 1785 | CUGAGCCAACCACUGUGCC | 364 | 1807 | GGCACAGUGGUUGGCUCAG | 564 |
| 1803 | CCCAACCUGAGCCAGAAAC | 365 | 1803 | CCCAACCUGAGCCAGAAAC | 365 | 1825 | GUUUCUGGCUCAGGUUGGG | 565 |
| 1821 | CCUGGGAGCAGAUCCUCCG | 366 | 1821 | CCUGGGAGCAGAUCCUCCG | 366 | 1843 | CGGAGGAUCUGCUCCCAGG | 566 |
| 1839 | GCCGAAAUGUCCUCCAGCA | 367 | 1839 | GCCGAAAUGUCCUCCAGCA | 367 | 1861 | UGCUGGAGGACAUUUCGGC | 567 |
| 1857 | AUGGGGCAGCUGCAGCCCC | 368 | 1857 | AUGGGGCAGCUGCAGCCCC | 368 | 1879 | GGGGCUGCAGCUGCCCCAU | 568 |
| 1875 | CCGUCUCGGCCCCCACCAG | 369 | 1875 | CCGUCUCGGCCCCCACCAG | 369 | 1897 | CUGGUGGGGGCCGAGACGG | 569 |
| 1893 | GUGGCUAUCAGGAGUUUGU | 370 | 1893 | GUGGCUAUCAGGAGUUUGU | 370 | 1915 | ACAAACUCCUGAUAGCCAC | 570 |
| 1911 | UACAUGCGGUGGAGCAGGG | 371 | 1911 | UACAUGCGGUGGAGCAGGG | 371 | 1933 | CCCUGCUCCACCGCAUGUA | 571 |
| 1929 | GUGGCACCCAGGCCAGUGC | 372 | 1929 | GUGGCACCCAGGCCAGUGC | 372 | 1951 | GCACUGGCCUGGGUGCCAC | 572 |
| 1947 | CGGUGGUGGGCUUGGGUCC | 373 | 1947 | CGGUGGUGGGCUUGGGUCC | 373 | 1969 | GGACCCAAGCCCACCACCG | 573 |
| 1965 | CCCCAGGAGAGGCUGGUUA | 374 | 1965 | CCCCAGGAGAGGCUGGUUA | 374 | 1987 | UAACCAGCCUCUCCUGGGG | 574 |
| 1983 | ACAAGGCCUUCUCAAGCCU | 375 | 1983 | ACAAGGCCUUCUCAAGCCU | 375 | 2005 | AGGCUUGAGAAGGCCUUGU | 575 |
| 2001 | UGCUUGCCAGCAGUGCUGU | 376 | 2001 | UGCUUGCCAGCAGUGCUGU | 376 | 2023 | ACAGCACUGCUGGCAAGCA | 576 |
| 2019 | UGUCCCCAGAGAAAUGUGG | 377 | 2019 | UGUCCCCAGAGAAAUGUGG | 377 | 2041 | CCACAUUUCUCUGGGGACA | 577 |
| 2037 | GGUUUGGGGCUAGCAGUGG | 378 | 2037 | GGUUUGGGGCUAGCAGUGG | 378 | 2059 | CCACUGCUAGCCCCAAACC | 578 |
| 2055 | GGGAAGAGGGGUAUAAGCC | 379 | 2055 | GGGAAGAGGGGUAUAAGCC | 379 | 2077 | GGCUUAUACCCCUCUUCCC | 579 |
| 2073 | CUUUCCAAGACCUCAUUCC | 380 | 2073 | CUUUCCAAGACCUCAUUCC | 380 | 2095 | GGAAUGAGGUCUUGGAAAG | 580 |
| 2091 | CUGGCUGCCCUGGGGACCC | 381 | 2091 | CUGGCUGCCCUGGGGACCC | 381 | 2113 | GGGUCCCCAGGGCAGCCAG | 581 |
| 2109 | CUGCCCCAGUCCCUGUCCC | 382 | 2109 | CUGCCCCAGUCCCUGUCCC | 382 | 2131 | GGGACAGGGACUGGGGCAG | 582 |
| 2127 | CCUUGUUCACCUUUGGACU | 383 | 2127 | CCUUGUUCACCUUUGGACU | 383 | 2149 | AGUCCAAAGGUGAACAAGG | 583 |
| 2145 | UGGACAGGGAGCCACCUCG | 384 | 2145 | UGGACAGGGAGCCACCUCG | 384 | 2167 | CGAGGUGGCUCCCUGUCCA | 584 |
| 2163 | GCAGUCCGCAGAGCUCACA | 385 | 2163 | GCAGUCCGCAGAGCUCACA | 385 | 2185 | UGUGAGCUCUGCGGACUGC | 585 |
| 2181 | AUCUCCCAAGCAGCUCCCC | 386 | 2181 | AUCUCCCAAGCAGCUCCCC | 386 | 2203 | GGGGAGCUGCUUGGGAGAU | 586 |
| 2199 | CAGAGCACCUGGGUCUGGA | 387 | 2199 | CAGAGCACCUGGGUCUGGA | 387 | 2221 | UCCAGACCCAGGUGCUCUG | 587 |
| 2217 | AGCCGGGGGAAAAGGUAGA | 388 | 2217 | AGCCGGGGGAAAAGGUAGA | 388 | 2239 | UCUACCUUUUCCCCCGGCU | 588 |
| 2235 | AGGACAUGCCAAAGCCCCC | 389 | 2235 | AGGACAUGCCAAAGCCCCC | 389 | 2257 | GGGGGCUUUGGCAUGUCCU | 589 |
| 2253 | CACUUCCCCAGGAGCAGGC | 390 | 2253 | CACUUCCCCAGGAGCAGGC | 390 | 2275 | GCCUGCUCCUGGGGAAGUG | 590 |
| 2271 | CCACAGACCCCCUUGUGGA | 391 | 2271 | CCACAGACCCCCUUGUGGA | 391 | 2293 | UCCACAAGGGGGUCUGUGG | 591 |
| 2289 | ACAGCCUGGGCAGUGGCAU | 392 | 2289 | ACAGCCUGGGCAGUGGCAU | 392 | 2311 | AUGCCACUGCCCAGGCUGU | 592 |
| 2307 | UUGUCUACUCAGCCCUUAC | 393 | 2307 | UUGUCUACUCAGCCCUUAC | 393 | 2329 | GUAAGGGCUGAGUAGACAA | 593 |
| 2325 | CCUGCCACCUGUGCGGCCA | 394 | 2325 | CCUGCCACCUGUGCGGCCA | 394 | 2347 | UGGCCGCACAGGUGGCAGG | 594 |
| 2343 | ACCUGAAACAGUGUCAUGG | 395 | 2343 | ACCUGAAACAGUGUCAUGG | 395 | 2365 | CCAUGACACUGUUUCAGGU | 595 |
| 2361 | GCCAGGAGGAUGGUGGCCA | 396 | 2361 | GCCAGGAGGAUGGUGGCCA | 396 | 2383 | UGGCCACCAUCCUCCUGGC | 596 |
| 2379 | AGACCCCUGUCAUGGCCAG | 397 | 2379 | AGACCCCUGUCAUGGCCAG | 397 | 2401 | CUGGCCAUGACAGGGGUCU | 597 |
| 2397 | GUCCUUGCUGUGGCUGCUG | 398 | 2397 | GUCCUUGCUGUGGCUGCUG | 398 | 2419 | CAGCAGCCACAGCAAGGAC | 598 |
| 2415 | GCUGUGGAGACAGGUCCUC | 399 | 2415 | GCUGUGGAGACAGGUCCUC | 399 | 2437 | GAGGACCUGUCUCCACAGC | 599 |
| 2433 | CGCCCCCUACAACCCCCCU | 400 | 2433 | CGCCCCCUACAACCCCCCU | 400 | 2455 | AGGGGGGUUGUAGGGGGCG | 600 |
| 2451 | UGAGGGCCCCAGACCCCUC | 401 | 2451 | UGAGGGCCCCAGACCCCUC | 401 | 2473 | GAGGGGUCUGGGGCCCUCA | 601 |
| 2469 | CUCCAGGUGGGGUUCCACU | 402 | 2469 | CUCCAGGUGGGGUUCCACU | 402 | 2491 | AGUGGAACCCCACCUGGAG | 602 |
| 2487 | UGGAGGCCAGUCUGUGUCC | 403 | 2487 | UGGAGGCCAGUCUGUGUCC | 403 | 2509 | GGACACAGACUGGCCUCCA | 603 |
| 2505 | CGGCCUCCCUGGCACCCUC | 404 | 2505 | CGGCCUCCCUGGCACCCUC | 404 | 2527 | GAGGGUGCCAGGGAGGCCG | 604 |
| 2523 | CGGGCAUCUCAGAGAAGAG | 405 | 2523 | CGGGCAUCUCAGAGAAGAG | 405 | 2545 | CUCUUCUCUGAGAUGCCCG | 605 |
| 2541 | GUAAAUCCUCAUCAUCCUU | 406 | 2541 | GUAAAUCCUCAUCAUCCUU | 406 | 2563 | AAGGAUGAUGAGGAUUUAC | 606 |
| 2559 | UCCAUCCUGCCCCUGGCAA | 407 | 2559 | UCCAUCCUGCCCCUGGCAA | 407 | 2581 | UUGCCAGGGGCAGGAUGGA | 607 |
| 2577 | AUGCUCAGAGCUCAAGCCA | 408 | 2577 | AUGCUCAGAGCUCAAGCCA | 408 | 2599 | UGGCUUGAGCUCUGAGCAU | 608 |
| 2595 | AGACCCCCAAAAUCGUGAA | 409 | 2595 | AGACCCCCAAAAUCGUGAA | 409 | 2617 | UUCACGAUUUUGGGGGUCU | 609 |
| 2613 | ACUUUGUCUCCGUGGGACC | 410 | 2613 | ACUUUGUCUCCGUGGGACC | 410 | 2635 | GGUCCCACGGAGACAAAGU | 610 |
| 2631 | CCACAUACAUGAGGGUCUC | 411 | 2631 | CCACAUACAUGAGGGUCUC | 411 | 2653 | GAGACCCUCAUGUAUGUGG | 611 |
| 2649 | CUUAGGUGCAUGUCCUCUU | 412 | 2649 | CUUAGGUGCAUGUCCUCUU | 412 | 2671 | AAGAGGACAUGCACCUAAG | 612 |
| 2667 | UGUUGCUGAGUCUGCAGAU | 413 | 2667 | UGUUGCUGAGUCUGCAGAU | 413 | 2689 | AUCUGCAGACUCAGCAACA | 613 |
| 2685 | UGAGGACUAGGGCUUAUCC | 414 | 2685 | UGAGGACUAGGGCUUAUCC | 414 | 2707 | GGAUAAGCCCUAGUCCUCA | 614 |
| 2703 | CAUGCCUGGGAAAUGCCAC | 415 | 2703 | CAUGCCUGGGAAAUGCCAC | 415 | 2725 | GUGGCAUUUCCCAGGCAUG | 615 |
| 2721 | CCUCCUGGAAGGCAGCCAG | 416 | 2721 | CCUCCUGGAAGGCAGCCAG | 416 | 2743 | CUGGCUGCCUUCCAGGAGG | 616 |
| 2739 | GGCUGGCAGAUUUCCAAAA | 417 | 2739 | GGCUGGCAGAUUUCCAAAA | 417 | 2761 | UUUUGGAAAUCUGCCAGCC | 617 |
| 2757 | AGACUUGAAGAACCAUGGU | 418 | 2757 | AGACUUGAAGAACCAUGGU | 418 | 2779 | ACCAUGGUUCUUCAAGUCU | 618 |
| 2775 | UAUGAAGGUGAUUGGCCCC | 419 | 2775 | UAUGAAGGUGAUUGGCCCC | 419 | 2797 | GGGGCCAAUCACCUUCAUA | 619 |
| 2793 | CACUGACGUUGGCCUAACA | 420 | 2793 | CACUGACGUUGGCCUAACA | 420 | 2815 | UGUUAGGCCAACGUCAGUG | 620 |
| 2811 | ACUGGGCUGCAGAGACUGG | 421 | 2811 | ACUGGGCUGCAGAGACUGG | 421 | 2833 | CCAGUCUCUGCAGCCCAGU | 621 |
| 2829 | GACCCCGCCCAGCAUUGGG | 422 | 2829 | GACCCCGCCCAGCAUUGGG | 422 | 2851 | CCCAAUGCUGGGCGGGGUC | 622 |
| 2847 | GCUGGGCUCGCCACAUCCC | 423 | 2847 | GCUGGGCUCGCCACAUCCC | 423 | 2869 | GGGAUGUGGCGAGCCCAGC | 623 |
| 2865 | CAUGAGAGUAGAGGGCACU | 424 | 2865 | CAUGAGAGUAGAGGGCACU | 424 | 2887 | AGUGCCCUCUACUCUCAUG | 624 |
| 2883 | UGGGUCGCCGUGCCCCACG | 425 | 2883 | UGGGUCGCCGUGCCCCACG | 425 | 2905 | CGUGGGGCACGGCGACCCA | 625 |
| 2901 | GGCAGGCCCCUGCAGGAAA | 426 | 2901 | GGCAGGCCCCUGCAGGAAA | 426 | 2923 | UUUCCUGCAGGGGCCUGCC | 626 |
| 2919 | AACUGAGGCCCUUGGGCAC | 427 | 2919 | AACUGAGGCCCUUGGGCAC | 427 | 2941 | GUGCCCAAGGGCCUCAGUU | 627 |
| 2937 | CCUCGACUUGUGAACGAGU | 428 | 2937 | CCUCGACUUGUGAACGAGU | 428 | 2959 | ACUCGUUCACAAGUCGAGG | 628 |
| 2955 | UUGUUGGCUGCUCCCUCCA | 429 | 2955 | UUGUUGGCUGCUCCCUCCA | 429 | 2977 | UGGAGGGAGCAGCCAACAA | 629 |
| 2973 | ACAGCUUCUGCAGCAGACU | 430 | 2973 | ACAGCUUCUGCAGCAGACU | 430 | 2995 | AGUCUGCUGCAGAAGCUGU | 630 |
| 2991 | UGUCCCUGUUGUAACUGCC | 431 | 2991 | UGUCCCUGUUGUAACUGCC | 431 | 3013 | GGCAGUUACAACAGGGACA | 631 |
| 3009 | CCAAGGCAUGUUUUGCCCA | 432 | 3009 | CCAAGGCAUGUUUUGCCCA | 432 | 3031 | UGGGCAAAACAUGCCUUGG | 632 |
| 3027 | ACCAGAUCAUGGCCCACGU | 433 | 3027 | ACCAGAUCAUGGCCCACGU | 433 | 3049 | ACGUGGGCCAUGAUCUGGU | 633 |
| 3045 | UGGAGGCCCACCUGCCUCU | 434 | 3045 | UGGAGGCCCACCUGCCUCU | 434 | 3067 | AGAGGCAGGUGGGCCUCCA | 634 |
| 3063 | UGUCUCACUGAACUAGAAG | 435 | 3063 | UGUCUCACUGAACUAGAAG | 435 | 3085 | CUUCUAGUUCAGUGAGACA | 635 |
| 3081 | GCCGAGCCUAGAAACUAAC | 436 | 3081 | GCCGAGCCUAGAAACUAAC | 436 | 3103 | GUUAGUUUCUAGGCUCGGC | 636 |
| 3099 | CACAGCCAUCAAGGGAAUG | 437 | 3099 | CACAGCCAUCAAGGGAAUG | 437 | 3121 | CAUUCCCUUGAUGGCUGUG | 637 |
| 3117 | GACUUGGGCGGCCUUGGGA | 438 | 3117 | GACUUGGGCGGCCUUGGGA | 438 | 3139 | UCCCAAGGCCGCCCAAGUC | 638 |
| 3135 | AAAUCGAUGAGAAAUUGAA | 439 | 3135 | AAAUCGAUGAGAAAUUGAA | 439 | 3157 | UUCAAUUUCUCAUCGAUUU | 639 |
| 3153 | ACUUCAGGGAGGGUGGUCA | 440 | 3153 | ACUUCAGGGAGGGUGGUCA | 440 | 3175 | UGACCACCCUCCCUGAAGU | 640 |
| 3171 | AUUGCCUAGAGGUGCUCAU | 441 | 3171 | AUUGCCUAGAGGUGCUCAU | 441 | 3193 | AUGAGCACCUCUAGGCAAU | 641 |
| 3189 | UUCAUUUAACAGAGCUUCC | 442 | 3189 | UUCAUUUAACAGAGCUUCC | 442 | 3211 | GGAAGCUCUGUUAAAUGAA | 642 |
| 3207 | CUUAGGUUGAUGCUGGAGG | 443 | 3207 | CUUAGGUUGAUGCUGGAGG | 443 | 3229 | CCUCCAGCAUCAACCUAAG | 643 |
| 3225 | GCAGAAUCCCGGCUGUCAA | 444 | 3225 | GCAGAAUCCCGGCUGUCAA | 444 | 3247 | UUGACAGCCGGGAUUCUGC | 644 |
| 3243 | AGGGGUGUUCAGUUAAGGG | 445 | 3243 | AGGGGUGUUCAGUUAAGGG | 445 | 3265 | CCCUUAACUGAACACCCCU | 645 |
| 3261 | GGAGCAACAGAGGACAUGA | 446 | 3261 | GGAGCAACAGAGGACAUGA | 446 | 3283 | UCAUGUCCUCUGUUGCUCC | 646 |
| 3279 | AAAAAUUGCUAUGACUAAA | 447 | 3279 | AAAAAUUGCUAUGACUAAA | 447 | 3301 | UUUAGUCAUAGCAAUUUUU | 647 |
| 3297 | AGCAGGGACAAUUUGCUGC | 448 | 3297 | AGCAGGGACAAUUUGCUGC | 448 | 3319 | GCAGCAAAUUGUCCCUGCU | 648 |
| 3315 | CCAAACACCCAUGCCCAGC | 449 | 3315 | CCAAACACCCAUGCCCAGC | 449 | 3337 | GCUGGGCAUGGGUGUUUGG | 649 |
| 3333 | CUGUAUGGCUGGGGGCUCC | 450 | 3333 | CUGUAUGGCUGGGGGCUCC | 450 | 3355 | GGAGCCCCCAGCCAUACAG | 650 |
| 3351 | CUCGUAUGCAUGGAACCCC | 451 | 3351 | CUCGUAUGCAUGGAACCCC | 451 | 3373 | GGGGUUCCAUGCAUACGAG | 651 |
| 3369 | CCAGAAUAAAUAUGCUCAG | 452 | 3369 | CCAGAAUAAAUAUGCUCAG | 452 | 3391 | CUGAGCAUAUUUAUUCUGG | 652 |
| 3387 | GCCACCCUGUGGGCCGGGC | 453 | 3387 | GCCACCCUGUGGGCCGGGC | 453 | 3409 | GCCCGGCCCACAGGGUGGC | 653 |
| 3405 | CAAUCCAGACAGCAGGCAU | 454 | 3405 | CAAUCCAGACAGCAGGCAU | 454 | 3427 | AUGCCUGCUGUCUGGAUUG | 654 |
| 3423 | UAAGGCACCAGUUACCCUG | 455 | 3423 | UAAGGCACCAGUUACCCUG | 455 | 3445 | CAGGGUAACUGGUGCCUUA | 655 |
| 3441 | GCAUGUUGGCCCAGACCUC | 456 | 3441 | GCAUGUUGGCCCAGACCUC | 456 | 3463 | GAGGUCUGGGCCAACAUGC | 656 |
| 3459 | CAGGUGCUAGGGAAGGCGG | 457 | 3459 | CAGGUGCUAGGGAAGGCGG | 457 | 3481 | CCGCCUUCCCUAGCACCUG | 657 |
| 3477 | GGAACCUUGGGUUGAGUAA | 458 | 3477 | GGAACCUUGGGUUGAGUAA | 458 | 3499 | UUACUCAACCCAAGGUUCC | 658 |
| 3495 | AUGCUCGUCUGUGUGUUUU | 459 | 3495 | AUGCUCGUCUGUGUGUUUU | 459 | 3517 | AAAACACACAGACGAGCAU | 659 |
| 3513 | UAGUUUCAUCACCUGUUAU | 460 | 3513 | UAGUUUCAUCACCUGUUAU | 460 | 3535 | AUAACAGGUGAUGAAACUA | 660 |
| 3531 | UCUGUGUUUGCUGAGGAGA | 461 | 3531 | UCUGUGUUUGCUGAGGAGA | 461 | 3553 | UCUCCUCAGCAAACACAGA | 661 |
| 3549 | AGUGGAACAGAAGGGGUGG | 462 | 3549 | AGUGGAACAGAAGGGGUGG | 462 | 3571 | CCACCCCUUCUGUUCCACU | 662 |
| 3567 | GAGUUUUGUAUAAAUAAAG | 463 | 3567 | GAGUUUUGUAUAAAUAAAG | 463 | 3589 | CUUUAUUUAUACAAAACUC | 663 |
| 3577 | UAAAUAAAGUUUCUUUGUC | 464 | 3577 | UAAAUAAAGUUUCUUUGUC | 464 | 3599 | GACAAAGAAACUUUAUUUA | 664 |

IL13 NM_002188

| | | | | | | | | |
|---|---|---|---|---|---|---|---|---|
| 3 | GCCACCCAGCCUAUGCAUC | 665 | 3 | GCCACCCAGCCUAUGCAUC | 665 | 25 | GAUGCAUAGGCUGGGUGGC | 736 |
| 21 | CCGCUCCUCAAUCCUCUCC | 666 | 21 | CCGCUCCUCAAUCCUCUCC | 666 | 43 | GGAGAGGAUUGAGGAGCGG | 737 |
| 39 | CUGUUGGCACUGGGCCUCA | 667 | 39 | CUGUUGGCACUGGGCCUCA | 667 | 61 | UGAGGCCCAGUGCCAACAG | 738 |
| 57 | AUGGCGCUUUUGUUGACCA | 668 | 57 | AUGGCGCUUUUGUUGACCA | 668 | 79 | UGGUCAACAAAAGCGCCAU | 739 |
| 75 | ACGGUCAUUGCUCUCACUU | 669 | 75 | ACGGUCAUUGCUCUCACUU | 669 | 97 | AAGUGAGAGCAAUGACCGU | 740 |
| 93 | UGCCUUGGCGGCUUUGCCU | 670 | 93 | UGCCUUGGCGGCUUUGCCU | 670 | 115 | AGGCAAAGCCGCCAAGGCA | 741 |
| 111 | UCCCCAGGCCCUGUGCCUC | 671 | 111 | UCCCCAGGCCCUGUGCCUC | 671 | 133 | GAGGCACAGGGCCUGGGGA | 742 |
| 129 | CCCUCUACAGCCCUCAGGG | 672 | 129 | CCCUCUACAGCCCUCAGGG | 672 | 151 | CCCUGAGGGCUGUAGAGGG | 743 |
| 147 | GAGCUCAUUGAGGAGCUGG | 673 | 147 | GAGCUCAUUGAGGAGCUGG | 673 | 169 | CCAGCUCCUCAAUGAGCUC | 744 |
| 165 | GUCAACAUCACCCAGAACC | 674 | 165 | GUCAACAUCACCCAGAACC | 674 | 187 | GGUUCUGGGUGAUGUUGAC | 745 |
| 183 | CAGAAGGCUCCGCUCUGCA | 675 | 183 | CAGAAGGCUCCGCUCUGCA | 675 | 205 | UGCAGAGCGGAGCCUUCUG | 746 |
| 201 | AAUGGCAGCAUGGUAUGGA | 676 | 201 | AAUGGCAGCAUGGUAUGGA | 676 | 223 | UCCAUACCAUGCUGCCAUU | 747 |
| 219 | AGCAUCAACCUGACAGCUG | 677 | 219 | AGCAUCAACCUGACAGCUG | 677 | 241 | CAGCUGUCAGGUUGAUGCU | 748 |
| 237 | GGCAUGUACUGUGCAGCCC | 678 | 237 | GGCAUGUACUGUGCAGCCC | 678 | 259 | GGGCUGCACAGUACAUGCC | 749 |
| 255 | CUGGAAUCCCUGAUCAACG | 679 | 255 | CUGGAAUCCCUGAUCAACG | 679 | 277 | CGUUGAUCAGGGAUUCCAG | 750 |
| 273 | GUGUCAGGCUGCAGUGCCA | 680 | 273 | GUGUCAGGCUGCAGUGCCA | 680 | 295 | UGGCACUGCAGCCUGACAC | 751 |
| 291 | AUCGAGAAGACCCAGAGGA | 681 | 291 | AUCGAGAAGACCCAGAGGA | 681 | 313 | UCCUCUGGGUCUUCUCGAU | 752 |
| 309 | AUGCUGAGCGGAUUCUGCC | 682 | 309 | AUGCUGAGCGGAUUCUGCC | 682 | 331 | GGCAGAAUCCGCUCAGCAU | 753 |
| 327 | CCGCACAAGGUCUCAGCUG | 683 | 327 | CCGCACAAGGUCUCAGCUG | 683 | 349 | CAGCUGAGACCUUGUGCGG | 754 |
| 345 | GGGCAGUUUUCCAGCUUGC | 684 | 345 | GGGCAGUUUUCCAGCUUGC | 684 | 367 | GCAAGCUGGAAAACUGCCC | 755 |
| 363 | CAUGUCCGAGACACCAAAA | 685 | 363 | CAUGUCCGAGACACCAAAA | 685 | 385 | UUUUGGUGUCUCGGACAUG | 756 |
| 381 | AUCGAGGUGGCCCAGUUUG | 686 | 381 | AUCGAGGUGGCCCAGUUUG | 686 | 403 | CAAACUGGGCCACCUCGAU | 757 |
| 399 | GUAAAGGACCUGCUCUUAC | 687 | 399 | GUAAAGGACCUGCUCUUAC | 687 | 421 | GUAAGAGCAGGUCCUUUAC | 758 |
| 417 | CAUUUAAAGAAACUUUUUC | 688 | 417 | CAUUUAAAGAAACUUUUUC | 688 | 439 | GAAAAAGUUUCUUUAAAUG | 759 |
| 435 | CGCGAGGGACAGUUCAACU | 689 | 435 | CGCGAGGGACAGUUCAACU | 689 | 457 | AGUUGAACUGUCCCUCGCG | 760 |
| 453 | UGAAACUUCGAAAGCAUCA | 690 | 453 | UGAAACUUCGAAAGCAUCA | 690 | 475 | UGAUGCUUUCGAAGUUUCA | 761 |
| 471 | AUUAUUUGCAGAGACAGGA | 691 | 471 | AUUAUUUGCAGAGACAGGA | 691 | 493 | UCCUGUCUCUGCAAAUAAU | 762 |
| 489 | ACCUGACUAUUGAAGUUGC | 692 | 489 | ACCUGACUAUUGAAGUUGC | 692 | 511 | GCAACUUCAAUAGUCAGGU | 763 |
| 507 | CAGAUUCAUUUUUCUUUCU | 693 | 507 | CAGAUUCAUUUUUCUUUCU | 693 | 529 | AGAAAGAAAAAUGAAUCUG | 764 |
| 525 | UGAUGUCAAAAAUGUCUUG | 694 | 525 | UGAUGUCAAAAAUGUCUUG | 694 | 547 | CAAGACAUUUUUGACAUCA | 765 |
| 543 | GGGUAGGCGGGAAGGAGGG | 695 | 543 | GGGUAGGCGGGAAGGAGGG | 695 | 565 | CCCUCCUUCCCGCCUACCC | 766 |
| 561 | GUUAGGGAGGGGUAAAAUU | 696 | 561 | GUUAGGGAGGGGUAAAAUU | 696 | 583 | AAUUUUACCCCUCCCUAAC | 767 |
| 579 | UCCUUAGCUUAGACCUCAG | 697 | 579 | UCCUUAGCUUAGACCUCAG | 697 | 601 | CUGAGGUCUAAGCUAAGGA | 768 |
| 597 | GCCUGUGCUGCCCGUCUUC | 698 | 597 | GCCUGUGCUGCCCGUCUUC | 698 | 619 | GAAGACGGGCAGCACAGGC | 769 |
| 615 | CAGCCUAGCCGACCUCAGC | 699 | 615 | CAGCCUAGCCGACCUCAGC | 699 | 637 | GCUGAGGUCGGCUAGGCUG | 770 |
| 633 | CCUUCCCCUUGCCCAGGGC | 700 | 633 | CCUUCCCCUUGCCCAGGGC | 700 | 655 | GCCCUGGGCAAGGGGAAGG | 771 |
| 651 | CUCAGCCUGGUGGGCCUCC | 701 | 651 | CUCAGCCUGGUGGGCCUCC | 701 | 673 | GGAGGCCCACCAGGCUGAG | 772 |
| 669 | CUCUGUCCAGGGCCCUGAG | 702 | 669 | CUCUGUCCAGGGCCCUGAG | 702 | 691 | CUCAGGGCCCUGGACAGAG | 773 |
| 687 | GCUCGGUGGACCCAGGGAU | 703 | 687 | GCUCGGUGGACCCAGGGAU | 703 | 709 | AUCCCUGGGUCCACCGAGC | 774 |
| 705 | UGACAUGUCCCUACACCCC | 704 | 705 | UGACAUGUCCCUACACCCC | 704 | 727 | GGGGUGUAGGGACAUGUCA | 775 |
| 723 | CUCCCCUGCCCUAGAGCAC | 705 | 723 | CUCCCCUGCCCUAGAGCAC | 705 | 745 | GUGCUCUAGGGCAGGGGAG | 776 |
| 741 | CACUGUAGCAUUACAGUGG | 706 | 741 | CACUGUAGCAUUACAGUGG | 706 | 763 | CCACUGUAAUGCUACAGUG | 777 |
| 759 | GGUGCCCCCCUUGCCAGAC | 707 | 759 | GGUGCCCCCCUUGCCAGAC | 707 | 781 | GUCUGGCAAGGGGGGCACC | 778 |
| 777 | CAUGUGGUGGGACAGGGAC | 708 | 777 | CAUGUGGUGGGACAGGGAC | 708 | 799 | GUCCCUGUCCCACCACAUG | 779 |
| 795 | CCCACUUCACACACAGGCA | 709 | 795 | CCCACUUCACACACAGGCA | 709 | 817 | UGCCUGUGUGUGAAGUGGG | 780 |
| 813 | AACUGAGGCAGACAGCAGC | 710 | 813 | AACUGAGGCAGACAGCAGC | 710 | 835 | GCUGCUGUCUGCCUCAGUU | 781 |
| 831 | CUCAGGCACACUUCUUCUU | 711 | 831 | CUCAGGCACACUUCUUCUU | 711 | 853 | AAGAAGAAGUGUGCCUGAG | 782 |
| 849 | UGGUCUUAUUUAUUAUUGU | 712 | 849 | UGGUCUUAUUUAUUAUUGU | 712 | 871 | ACAAUAAUAAAUAAGACCA | 783 |
| 867 | UGUGUUAUUUAAAUGAGUG | 713 | 867 | UGUGUUAUUUAAAUGAGUG | 713 | 889 | CACUCAUUUAAAUAACACA | 784 |
| 885 | GUGUUUGUCACCGUUGGGG | 714 | 885 | GUGUUUGUCACCGUUGGGG | 714 | 907 | CCCCAACGGUGACAAACAC | 785 |
| 903 | GAUUGGGGAAGACUGUGGC | 715 | 903 | GAUUGGGGAAGACUGUGGC | 715 | 925 | GCCACAGUCUUCCCCAAUC | 786 |
| 921 | CUGCUAGCACUUGGAGCCA | 716 | 921 | CUGCUAGCACUUGGAGCCA | 716 | 943 | UGGCUCCAAGUGCUAGCAG | 787 |
| 939 | AAGGGUUCAGAGACUCAGG | 717 | 939 | AAGGGUUCAGAGACUCAGG | 717 | 961 | CCUGAGUCUCUGAACCCUU | 788 |
| 957 | GGCCCCAGCACUAAAGCAG | 718 | 957 | GGCCCCAGCACUAAAGCAG | 718 | 979 | CUGCUUUAGUGCUGGGGCC | 789 |
| 975 | GUGGACACCAGGAGUCCCU | 719 | 975 | GUGGACACCAGGAGUCCCU | 719 | 997 | AGGGACUCCUGGUGUCCAC | 790 |
| 993 | UGGUAAUAAGUACUGUGUA | 720 | 993 | UGGUAAUAAGUACUGUGUA | 720 | 1015 | UACACAGUACUUAUUACCA | 791 |
| 1011 | ACAGAAUUCUGCUACCUCA | 721 | 1011 | ACAGAAUUCUGCUACCUCA | 721 | 1033 | UGAGGUAGCAGAAUUCUGU | 792 |
| 1029 | ACUGGGGUCCUGGGGCCUC | 722 | 1029 | ACUGGGGUCCUGGGGCCUC | 722 | 1051 | GAGGCCCCAGGACCCCAGU | 793 |
| 1047 | CGGAGCCUCAUCCGAGGCA | 723 | 1047 | CGGAGCCUCAUCCGAGGCA | 723 | 1069 | UGCCUCGGAUGAGGCUCCG | 794 |
| 1055 | AGGGUCAGGAGAGGGGCAG | 724 | 1055 | AGGGUCAGGAGAGGGGCAG | 724 | 1087 | CUGCCCCUCUCCUGACCCU | 795 |
| 1083 | GAACAGCCGCUCCUGUCUG | 725 | 1083 | GAACAGCCGCUCCUGUCUG | 725 | 1105 | CAGACAGGAGCGGCUGUUC | 796 |
| 1101 | GCCAGCCAGCAGCCAGCUC | 726 | 1101 | GCCAGCCAGCAGCCAGCUC | 726 | 1123 | GAGCUGGCUGCUGGCUGGC | 797 |
| 1119 | CUCAGCCAACGAGUAAUUU | 727 | 1119 | CUCAGCCAACGAGUAAUUU | 727 | 1141 | AAAUUACUCGUUGGCUGAG | 798 |
| 1137 | UAUUGUUUUUCCUUGUAUU | 728 | 1137 | UAUUGUUUUUCCUUGUAUU | 728 | 1159 | AAUACAAGGAAAAACAAUA | 799 |
| 1155 | UUAAAUAUUAAAUAUGUUA | 729 | 1155 | UUAAAUAUUAAAUAUGUUA | 729 | 1177 | UAACAUAUUUAAUAUUUAA | 800 |
| 1173 | AGCAAAGAGUUAAUAUAUA | 730 | 1173 | AGCAAAGAGUUAAUAUAUA | 730 | 1195 | UAUAUAUUAACUCUUUGCU | 801 |
| 1191 | AGAAGGGUACCUUGAACAC | 731 | 1191 | AGAAGGGUACCUUGAACAC | 731 | 1213 | GUGUUCAAGGUACCCUUCU | 802 |
| 1209 | CUGGGGGAGGGGACAUUGA | 732 | 1209 | CUGGGGGAGGGGACAUUGA | 732 | 1231 | UCAAUGUCCCCUCCCCCAG | 803 |
| 1227 | AACAAGUUGUUUCAUUGAC | 733 | 1227 | AACAAGUUGUUUCAUUGAC | 733 | 1249 | GUCAAUGAAACAACUUGUU | 804 |
| 1245 | CUAUCAAACUGAAGCCAGA | 734 | 1245 | CUAUCAAACUGAAGCCAGA | 734 | 1267 | UCUGGCUUCAGUUUGAUAG | 805 |
| 1262 | GAAAUAAAGUUGGUGACAG | 735 | 1262 | GAAAUAAAGUUGGUGACAG | 735 | 1284 | CUGUCACCAACUUUAUUUC | 806 |

IL13RA1 NM_001560

| | | | | | | | | |
|---|---|---|---|---|---|---|---|---|
| 3 | CCAAGGCUCCAGCCCGGCC | 807 | 3 | CCAAGGCUCCAGCCCGGCC | 807 | 25 | GGCCGGGCUGGAGCCUUGG | 1030 |
| 21 | CGGGCUCCGAGGCGAGAGG | 808 | 21 | CGGGCUCCGAGGCGAGAGG | 808 | 43 | CCUCUCGCCUCGGAGCCCG | 1031 |
| 39 | GCUGCAUGGAGUGGCCGGC | 809 | 39 | GCUGCAUGGAGUGGCCGGC | 809 | 61 | GCCGGGCACUCCAUGCAGC | 1032 |
| 57 | CGCGGCUCUGCGGGCUGUG | 810 | 57 | CGCGGCUCUGCGGGCUGUG | 810 | 79 | CACAGCCCGCAGAGCCGCG | 1033 |
| 75 | GGGCGCUGCUGCUCUGCGC | 811 | 75 | GGGCGCUGCUGCUCUGCGC | 811 | 97 | GCGCAGAGCAGCAGCGCCC | 1034 |
| 93 | CCGGCGGCGGGGGCGGGGG | 812 | 93 | CCGGCGGCGGGGGCGGGGG | 812 | 115 | CCCCCGCCCCCGCCGCCGG | 1035 |
| 111 | GCGGGGGCGCCGCGCCUAC | 813 | 111 | GCGGGGGCGCCGCGCCUAC | 813 | 133 | GUAGGCGCGGCGCCCCCGC | 1036 |
| 129 | CGGAAACUCAGCCACCUGU | 814 | 129 | CGGAAACUCAGCCACCUGU | 814 | 151 | ACAGGUGGCUGAGUUUCCG | 1037 |
| 147 | UGACAAAUUUGAGUGUCUC | 815 | 147 | UGACAAAUUUGAGUGUCUC | 815 | 169 | GAGACACUCAAAUUUGUCA | 1038 |
| 165 | CUGUUGAAAACCUCUGCAC | 816 | 165 | CUGUUGAAAACCUCUGCAC | 816 | 187 | GUGCAGAGGUUUUCAACAG | 1039 |
| 183 | CAGUAAUAUGGACAUGGAA | 817 | 183 | CAGUAAUAUGGACAUGGAA | 817 | 205 | UUCCAUGUCCAUAUUACUG | 1040 |
| 201 | AUCCACCCGAGGGAGCCAG | 818 | 201 | AUCCACCCGAGGGAGCCAG | 818 | 223 | CUGGCUCCCUCGGGUGGAU | 1041 |
| 219 | GCUCAAAUUGUAGUCUAUG | 819 | 219 | GCUCAAAUUGUAGUCUAUG | 819 | 241 | CAUAGACUACAAUUUGAGC | 1042 |
| 237 | GGUAUUUUAGUCAUUUUGG | 820 | 237 | GGUAUUUUAGUCAUUUUGG | 820 | 259 | CCAAAAUGACUAAAAUACC | 1043 |
| 255 | GCGACAAACAAGAUAAGAA | 821 | 255 | GCGACAAACAAGAUAAGAA | 821 | 277 | UUCUUAUCUUGUUUGUCGC | 1044 |
| 273 | AAAUAGCUCCGGAAACUCG | 822 | 273 | AAAUAGCUCCGGAAACUCG | 822 | 295 | CGAGUUUCCGGAGCUAUUU | 1045 |
| 291 | GUCGUUCAAUAGAAGUACC | 823 | 291 | GUCGUUCAAUAGAAGUACC | 823 | 313 | GGUACUUCUAUUGAACGAC | 1046 |
| 309 | CCCUGAAUGAGAGGAUUUG | 824 | 309 | CCCUGAAUGAGAGGAUUUG | 824 | 331 | CAAAUCCUCUCAUUCAGGG | 1047 |
| 327 | GUCUGCAAGUGGGGUCCCA | 825 | 327 | GUCUGCAAGUGGGGUCCCA | 825 | 349 | UGGGACCCCACUUGCAGAC | 1048 |
| 345 | AGUGUAGCACCAAUGAGAG | 826 | 345 | AGUGUAGCACCAAUGAGAG | 826 | 367 | CUCUCAUUGGUGCUACACU | 1049 |
| 363 | GUGAGAAGCCUAGCAUUUU | 827 | 363 | GUGAGAAGCCUAGCAUUUU | 827 | 385 | AAAAUGCUAGGCUUCUCAC | 1050 |
| 381 | UGGUUGAAAAAUGCAUCUC | 828 | 381 | UGGUUGAAAAAUGCAUCUC | 828 | 403 | GAGAUGCAUUUUUCAACCA | 1051 |
| 399 | CACCCCCAGAAGGUGAUCC | 829 | 399 | CACCCCCAGAAGGUGAUCC | 829 | 421 | GGAUCACCUUCUGGGGGUG | 1052 |
| 417 | CUGAGUCUGCUGUGACUGA | 830 | 417 | CUGAGUCUGCUGUGACUGA | 830 | 439 | UCAGUCACAGCAGACUCAG | 1053 |
| 435 | AGCUUCAAUGCAUUUGGCA | 831 | 435 | AGCUUCAAUGCAUUUGGCA | 831 | 457 | UGCCAAAUGCAUUGAAGCU | 1054 |
| 453 | ACAACCUGAGCUACAUGAA | 832 | 453 | ACAACCUGAGCUACAUGAA | 832 | 475 | UUCAUGUAGCUCAGGUUGU | 1055 |
| 471 | AGUGUUCUUGGCUCCCUGG | 833 | 471 | AGUGUUCUUGGCUCCCUGG | 833 | 493 | CCAGGGAGCCAAGAACACU | 1056 |
| 489 | GAAGGAAUACCAGUCCCGA | 834 | 489 | GAAGGAAUACCAGUCCCGA | 834 | 511 | UCGGGACUGGUAUUCCUUC | 1057 |
| 507 | ACACUAACUAUACUCUCUA | 835 | 507 | ACACUAACUAUACUCUCUA | 835 | 529 | UAGAGAGUAUAGUUAGUGU | 1058 |
| 525 | ACUAUUGGCACAGAAGCCU | 836 | 525 | ACUAUUGGCACAGAAGCCU | 836 | 547 | AGGCUUCUGUGCCAAUAGU | 1059 |
| 543 | UGGAAAAAAUUCAUCAAUG | 837 | 543 | UGGAAAAAAUUCAUCAAUG | 837 | 565 | CAUUGAUGAAUUUUUUCCA | 1060 |
| 561 | GUGAAAACAUCUUUAGAGA | 838 | 561 | GUGAAAACAUCUUUAGAGA | 838 | 583 | UCUCUAAAGAUGUUUUCAC | 1061 |
| 579 | AAGGCCAAUACUUUGGUUG | 839 | 579 | AAGGCCAAUACUUUGGUUG | 839 | 601 | CAACCAAAGUAUUGGCCUU | 1062 |
| 597 | GUUCCUUUGAUCUGACCAA | 840 | 597 | GUUCCUUUGAUCUGACCAA | 840 | 619 | UUGGUCAGAUCAAAGGAAC | 1063 |
| 615 | AAGUGAAGGAUUCCAGUUU | 841 | 615 | AAGUGAAGGAUUCCAGUUU | 841 | 637 | AAACUGGAAUCCUUCACUU | 1064 |
| 633 | UUGAACAACACAGUGUCCA | 842 | 633 | UUGAACAACACAGUGUCCA | 842 | 655 | UGGACACUGUGUUGUUCAA | 1065 |
| 651 | AAAUAAUGGUCAAGGAUAA | 843 | 651 | AAAUAAUGGUCAAGGAUAA | 843 | 673 | UUAUCCUUGACCAUUAUUU | 1066 |
| 669 | AUGCAGGAAAAAUUAAACC | 844 | 669 | AUGCAGGAAAAAUUAAACC | 844 | 691 | GGUUUAAUUUUUCCUGCAU | 1067 |
| 687 | CAUCCUUCAAUAUAGUGCC | 845 | 687 | CAUCCUUCAAUAUAGUGCC | 845 | 709 | GGCACUAUAUUGAAGGAUG | 1068 |
| 705 | CUUUAACUUCCCGUGUGAA | 846 | 705 | CUUUAACUUCCCGUGUGAA | 846 | 727 | UUCACACGGGAAGUUAAAG | 1069 |
| 723 | AACCUGAUCCUCCACAUAU | 847 | 723 | AACCUGAUCCUCCACAUAU | 847 | 745 | AUAUGUGGAGGAUCAGGUU | 1070 |
| 741 | UUAAAAACCUCUCCUUCCA | 848 | 741 | UUAAAAACCUCUCCUUCCA | 848 | 763 | UGGAAGGAGAGGUUUUUAA | 1071 |
| 759 | ACAAUGAUGACCUAUAUGU | 849 | 759 | ACAAUGAUGACCUAUAUGU | 849 | 781 | ACAUAUAGGUCAUCAUUGU | 1072 |
| 777 | UGCAAUGGGAGAAUCCACA | 850 | 777 | UGCAAUGGGAGAAUCCACA | 850 | 799 | UGUGGAUUCUCCCAUUGCA | 1073 |
| 795 | AGAAUUUUAUUAGCAGAUG | 851 | 795 | AGAAUUUUAUUAGCAGAUG | 851 | 817 | CAUCUGCUAAUAAAAUUCU | 1074 |
| 813 | GCCUAUUUUAUGAAGUAGA | 852 | 813 | GCCUAUUUUAUGAAGUAGA | 852 | 835 | UCUACUUCAUAAAAUAGGC | 1075 |
| 831 | AAGUCAAUAACAGCCAAAC | 853 | 831 | AAGUCAAUAACAGCCAAAC | 853 | 853 | GUUUGGCUGUUAUUGACUU | 1076 |
| 849 | CUGAGACACAUAAUGUUUU | 854 | 849 | CUGAGACACAUAAUGUUUU | 854 | 871 | AAAACAUUAUGUGUCUCAG | 1077 |
| 867 | UCUACGUCCAAGAGGCUAA | 855 | 867 | UCUACGUCCAAGAGGCUAA | 855 | 889 | UUAGCCUCUUGGACGUAGA | 1078 |
| 885 | AAUGUGAGAAUCCAGAAUU | 856 | 885 | AAUGUGAGAAUCCAGAAUU | 856 | 907 | AAUUCUGGAUUCUCACAUU | 1079 |
| 903 | UUGAGAGAAAUGUGGAGAA | 857 | 903 | UUGAGAGAAAUGUGGAGAA | 857 | 925 | UUCUCCACAUUUCUCUCAA | 1080 |
| 921 | AUACAUCUUGUUUCAUGGU | 858 | 921 | AUACAUCUUGUUUCAUGGU | 858 | 943 | ACCAUGAAACAAGAUGUAU | 1081 |
| 939 | UCCCUGGUGUUCUUCCUGA | 859 | 939 | UCCCUGGUGUUCUUCCUGA | 859 | 961 | UCAGGAAGAACACCAGGGA | 1082 |
| 957 | AUACUUUGAACACAGUCAG | 860 | 957 | AUACUUUGAACACAGUCAG | 860 | 979 | CUGACUGUGUUCAAAGUAU | 1083 |
| 975 | GAAUAAGAGUCAAAACAAA | 861 | 975 | GAAUAAGAGUCAAAACAAA | 861 | 997 | UUUGUUUUGACUCUUAUUC | 1084 |
| 993 | AUAAGUUAUGCUAUGAGGA | 862 | 993 | AUAAGUUAUGCUAUGAGGA | 862 | 1015 | UCCUCAUAGCAUAACUUAU | 1085 |
| 1011 | AUGACAAACUCUGGAGUAA | 863 | 1011 | AUGACAAACUCUGGAGUAA | 863 | 1033 | UUACUCCAGAGUUUGUCAU | 1086 |
| 1029 | AUUGGAGCCAAGAAAUGAG | 864 | 1029 | AUUGGAGCCAAGAAAUGAG | 864 | 1051 | CUCAUUUCUUGGCUCCAAU | 1087 |
| 1047 | GUAUAGGUAAGAAGCGCAA | 865 | 1047 | GUAUAGGUAAGAAGCGCAA | 865 | 1069 | UUGCGCUUCUUACCUAUAC | 1088 |
| 1065 | AUUCCACACUCUACAUAAC | 866 | 1065 | AUUCCACACUCUACAUAAC | 866 | 1087 | GUUAUGUAGAGUGUGGAAU | 1089 |
| 1083 | CCAUGUUACUCAUUGUUCC | 867 | 1083 | CCAUGUUACUCAUUGUUCC | 867 | 1105 | GGAACAAUGAGUAACAUGG | 1090 |
| 1101 | CAGUCAUCGUCGCAGGUGC | 868 | 1101 | CAGUCAUCGUCGCAGGUGC | 868 | 1123 | GCACCUGCGACGAUGACUG | 1091 |
| 1119 | CAAUCAUAGUACUCCUGCU | 869 | 1119 | CAAUCAUAGUACUCCUGCU | 869 | 1141 | AGCAGGAGUACUAUGAUUG | 1092 |
| 1137 | UUUACCUAAAAAGGCUCAA | 870 | 1137 | UUUACCUAAAAAGGCUCAA | 870 | 1159 | UUGAGCCUUUUUAGGUAAA | 1093 |
| 1155 | AGAUUAUUAUAUUCCCUCC | 871 | 1155 | AGAUUAUUAUAUUCCCUCC | 871 | 1177 | GGAGGGAAUAUAAUAAUCU | 1094 |
| 1173 | CAAUUCCUGAUCCUGGCAA | 872 | 1173 | CAAUUCCUGAUCCUGGCAA | 872 | 1195 | UUGCCAGGAUCAGGAAUUG | 1095 |
| 1191 | AGAUUUUUAAAGAAAUGUU | 873 | 1191 | AGAUUUUUAAAGAAAUGUU | 873 | 1213 | AACAUUUCUUUAAAAAUCU | 1096 |
| 1209 | UUGGAGACCAGAAUGAUGA | 874 | 1209 | UUGGAGACCAGAAUGAUGA | 874 | 1231 | UCAUCAUUCUGGUCUCCAA | 1097 |
| 1227 | AUACUCUGCACUGGAAGAA | 875 | 1227 | AUACUCUGCACUGGAAGAA | 875 | 1249 | UUCUUCCAGUGCAGAGUAU | 1098 |
| 1245 | AGUACGACAUCUAUGAGAA | 876 | 1245 | AGUACGACAUCUAUGAGAA | 876 | 1267 | UUCUCAUAGAUGUCGUACU | 1099 |
| 1263 | AGCAAACCAAGGAGGAAAC | 877 | 1263 | AGCAAACCAAGGAGGAAAC | 877 | 1285 | GUUUCCUCCUUGGUUUGCU | 1100 |
| 1281 | CCGACUCUGUAGUGCUGAU | 878 | 1281 | CCGACUCUGUAGUGCUGAU | 878 | 1303 | AUCAGCACUACAGAGUCGG | 1101 |
| 1299 | UAGAAAACCUGAAGAAAGC | 879 | 1299 | UAGAAAACCUGAAGAAAGC | 879 | 1321 | GCUUUCUUCAGGUUUUCUA | 1102 |
| 1317 | CCUCUCAGUGAUGGAGAUA | 880 | 1317 | CCUCUCAGUGAUGGAGAUA | 880 | 1339 | UAUCUCCAUCACUGAGAGG | 1103 |
| 1335 | AAUUUAUUUUUACCUUCAC | 881 | 1335 | AAUUUAUUUUUACCUUCAC | 881 | 1357 | GUGAAGGUAAAAAUAAAUU | 1104 |
| 1353 | CUGUGACCUUGAGAAGAUU | 882 | 1353 | CUGUGACCUUGAGAAGAUU | 882 | 1375 | AAUCUUCUCAAGGUCACAG | 1105 |
| 1371 | UCUUCCCAUUCUCCAUUUG | 883 | 1371 | UCUUCCCAUUCUCCAUUUG | 883 | 1393 | CAAAUGGAGAAUGGGAAGA | 1106 |
| 1389 | GUUAUCUGGGAACUUAUUA | 884 | 1389 | GUUAUCUGGGAACUUAUUA | 884 | 1411 | UAAUAAGUUCCCAGAUAAC | 1107 |
| 1407 | AAAUGGAAACUGAAACUAC | 885 | 1407 | AAAUGGAAACUGAAACUAC | 885 | 1429 | GUAGUUUCAGUUUCCAUUU | 1108 |
| 1425 | CUGCACCAUUUAAAAACAG | 886 | 1425 | CUGCACCAUUUAAAAACAG | 886 | 1447 | CUGUUUUUAAAUGGUGCAG | 1109 |
| 1443 | GGCAGCUCAUAAGAGCCAC | 887 | 1443 | GGCAGCUCAUAAGAGCCAC | 887 | 1465 | GUGGCUCUUAUGAGCUGCC | 1110 |
| 1461 | CAGGUCUUUAUGUUGAGUC | 888 | 1461 | CAGGUCUUUAUGUUGAGUC | 888 | 1483 | GACUCAACAUAAAGACCUG | 1111 |
| 1479 | CGCGCACCGAAAAACUAAA | 889 | 1479 | CGCGCACCGAAAAACUAAA | 889 | 1501 | UUUAGUUUUUCGGUGCGCG | 1112 |
| 1497 | AAAUAAUGGGCGCUUUGGA | 890 | 1497 | AAAUAAUGGGCGCUUUGGA | 890 | 1519 | UCCAAAGCGCCCAUUAUUU | 1113 |
| 1515 | AGAAGAGUGUGGAGUCAUU | 891 | 1515 | AGAAGAGUGUGGAGUCAUU | 891 | 1537 | AAUGACUCCACACUCUUCU | 1114 |
| 1533 | UCUCAUUGAAUUAUAAAAG | 892 | 1533 | UCUCAUUGAAUUAUAAAAG | 892 | 1555 | CUUUUAUAAUUCAAUGAGA | 1115 |
| 1551 | GCCAGCAGGCUUCAAACUA | 893 | 1551 | GCCAGCAGGCUUCAAACUA | 893 | 1573 | UAGUUUGAAGCCUGCUGGC | 1116 |
| 1569 | AGGGGACAAAGCAAAAAGU | 894 | 1569 | AGGGGACAAAGCAAAAAGU | 894 | 1591 | ACUUUUUGCUUUGUCCCCU | 1117 |
| 1587 | UGAUGAUAGUGGUGGAGUU | 895 | 1587 | UGAUGAUAGUGGUGGAGUU | 895 | 1609 | AACUCCACCACUAUCAUCA | 1118 |
| 1605 | UAAUCUUAUCAAGAGUUGU | 896 | 1605 | UAAUCUUAUCAAGAGUUGU | 896 | 1627 | ACAACUCUUGAUAAGAUUA | 1119 |
| 1623 | UGACAACUUCCUGAGGGAU | 897 | 1623 | UGACAACUUCCUGAGGGAU | 897 | 1645 | AUCCCUCAGGAAGUUGUCA | 1120 |
| 1641 | UCUAUACUUGCUUUGUGUU | 898 | 1641 | UCUAUACUUGCUUUGUGUU | 898 | 1663 | AACACAAAGCAAGUAUAGA | 1121 |
| 1659 | UCUUUGUGUCAACAUGAAC | 899 | 1659 | UCUUUGUGUCAACAUGAAC | 899 | 1681 | GUUCAUGUUGACACAAAGA | 1122 |
| 1677 | CAAAUUUUAUUUGUAGGGG | 900 | 1677 | CAAAUUUUAUUUGUAGGGG | 900 | 1699 | CCCCUACAAAUAAAAUUUG | 1123 |
| 1695 | GAACUCAUUUGGGGUGCAA | 901 | 1695 | GAACUCAUUUGGGGUGCAA | 901 | 1717 | UUGCACCCCAAAUGAGUUC | 1124 |
| 1713 | AAUGCUAAUGUCAAACUUG | 902 | 1713 | AAUGCUAAUGUCAAACUUG | 902 | 1735 | CAAGUUUGACAUUAGCAUU | 1125 |
| 1731 | GAGUCACAAAGAACAUGUA | 903 | 1731 | GAGUCACAAAGAACAUGUA | 903 | 1753 | UACAUGUUCUUUGUGACUC | 1126 |
| 1749 | AGAAAACAAAAUGGAUAAA | 904 | 1749 | AGAAAACAAAAUGGAUAAA | 904 | 1771 | UUUAUCCAUUUUGUUUUCU | 1127 |
| 1767 | AAUCUGAUAUGUAUUGUUU | 905 | 1767 | AAUCUGAUAUGUAUUGUUU | 905 | 1789 | AAACAAUACAUAUCAGAUU | 1128 |
| 1785 | UGGGAUCCUAUUGAACCAU | 906 | 1785 | UGGGAUCCUAUUGAACCAU | 906 | 1807 | AUGGUUCAAUAGGAUCCCA | 1129 |
| 1803 | UGUUUGUGGCUAUUAAAAC | 907 | 1803 | UGUUUGUGGCUAUUAAAAC | 907 | 1825 | GUUUUAAUAGCCACAAACA | 1130 |
| 1821 | CUCUUUUAACAGUCUGGGC | 908 | 1821 | CUCUUUUAACAGUCUGGGC | 908 | 1843 | GCCCAGACUGUUAAAAGAG | 1131 |
| 1839 | CUGGGUCCGGUGGCUCACG | 909 | 1839 | CUGGGUCCGGUGGCUCACG | 909 | 1861 | CGUGAGCCACCGGACCCAG | 1132 |
| 1857 | GCCUGUAAUCCCAGCAAUU | 910 | 1857 | GCCUGUAAUCCCAGCAAUU | 910 | 1879 | AAUUGCUGGGAUUACAGGC | 1133 |
| 1875 | UUGGGAGUCCGAGGCGGGC | 911 | 1875 | UUGGGAGUCCGAGGCGGGC | 911 | 1897 | GCCCGCCUCGGACUCCCAA | 1134 |
| 1893 | CGGAUCACUCGAGGUCAGG | 912 | 1893 | CGGAUCACUCGAGGUCAGG | 912 | 1915 | CCUGACCUCGAGUGAUCCG | 1135 |
| 1911 | GAGUUCCAGACCAGCCUGA | 913 | 1911 | GAGUUCCAGACCAGCCUGA | 913 | 1933 | UCAGGCUGGUCUGGAACUC | 1136 |
| 1929 | ACCAAAAUGGUGAAACCUC | 914 | 1929 | ACCAAAAUGGUGAAACCUC | 914 | 1951 | GAGGUUUCACCAUUUUGGU | 1137 |
| 1947 | CCUCUCUACUAAAACUACA | 915 | 1947 | CCUCUCUACUAAAACUACA | 915 | 1969 | UGUAGUUUUAGUAGAGAGG | 1138 |
| 1965 | AAAAAUUAACUGGGUGUGG | 916 | 1965 | AAAAAUUAACUGGGUGUGG | 916 | 1987 | CCACACCCAGUUAAUUUUU | 1139 |
| 1983 | GUGGCGCGUGCCUGUAAUC | 917 | 1983 | GUGGCGCGUGCCUGUAAUC | 917 | 2005 | GAUUACAGGCACGCGCCAC | 1140 |
| 2001 | CCCAGCUACUCGGGAAGCU | 918 | 2001 | CCCAGCUACUCGGGAAGCU | 918 | 2023 | AGCUUCCCGAGUAGCUGGG | 1141 |
| 2019 | UGAGGCAGGUGAAUUGUUU | 919 | 2019 | UGAGGCAGGUGAAUUGUUU | 919 | 2041 | AAACAAUUCACCUGCCUCA | 1142 |
| 2037 | UGAACCUGGGAGGUGGAGG | 920 | 2037 | UGAACCUGGGAGGUGGAGG | 920 | 2059 | CCUCCACCUCCCAGGUUCA | 1143 |
| 2055 | GUUGCAGUGAGCAGAGAUC | 921 | 2055 | GUUGCAGUGAGCAGAGAUC | 921 | 2077 | GAUCUCUGCUCACUGCAAC | 1144 |
| 2073 | CACACCACUGCACUCUAGC | 922 | 2073 | CACACCACUGCACUCUAGC | 922 | 2095 | GCUAGAGUGCAGUGGUGUG | 1145 |
| 2091 | CCUGGGUGACAGAGCAAGA | 923 | 2091 | CCUGGGUGACAGAGCAAGA | 923 | 2113 | UCUUGCUCUGUCACCCAGG | 1146 |
| 2109 | ACUCUGUCUAAAAAACAAA | 924 | 2109 | ACUCUGUCUAAAAAACAAA | 924 | 2131 | UUUGUUUUUUAGACAGAGU | 1147 |
| 2127 | AACAAAACAAAACAAAACA | 925 | 2127 | AACAAAACAAAACAAAACA | 925 | 2149 | UGUUUUGUUUUGUUUUGUU | 1148 |
| 2145 | AAAAAAACCUCUUAAUAUU | 926 | 2145 | AAAAAAACCUCUUAAUAUU | 926 | 2167 | AAUAUUAAGAGGUUUUUUU | 1149 |
| 2163 | UCUGGAGUCAUCAUUCCCU | 927 | 2163 | UCUGGAGUCAUCAUUCCCU | 927 | 2185 | AGGGAAUGAUGACUCCAGA | 1150 |
| 2181 | UUCGACAGCAUUUUCCUCU | 928 | 2181 | UUCGACAGCAUUUUCCUCU | 928 | 2203 | AGAGGAAAAUGCUGUCGAA | 1151 |
| 2199 | UGCUUUGAAAGCCCCAGAA | 929 | 2199 | UGCUUUGAAAGCCCCAGAA | 929 | 2221 | UUCUGGGGCUUUCAAAGCA | 1152 |
| 2217 | AAUCAGUGUUGGCCAUGAU | 930 | 2217 | AAUCAGUGUUGGCCAUGAU | 930 | 2239 | AUCAUGGCCAACACUGAUU | 1153 |
| 2235 | UGACAACUACAGAAAAACC | 931 | 2235 | UGACAACUACAGAAAAACC | 931 | 2257 | GGUUUUUCUGUAGUUGUCA | 1154 |
| 2253 | CAGAGGCAGCUUCUUUGCC | 932 | 2253 | CAGAGGCAGCUUCUUUGCC | 932 | 2275 | GGCAAAGAAGCUGCCUCUG | 1155 |
| 2271 | CAAGACCUUUCAAAGCCAU | 933 | 2271 | CAAGACCUUUCAAAGCCAU | 933 | 2293 | AUGGCUUUGAAAGGUCUUG | 1156 |
| 2289 | UUUUAGGCUGUUAGGGGCA | 934 | 2289 | UUUUAGGCUGUUAGGGGCA | 934 | 2311 | UGCCCCUAACAGCCUAAAA | 1157 |
| 2307 | AGUGGAGGUAGAAUGACUC | 935 | 2307 | AGUGGAGGUAGAAUGACUC | 935 | 2329 | GAGUCAUUCUACCUCCACU | 1158 |
| 2325 | CCUUGGGUAUUAGAGUUUC | 936 | 2325 | CCUUGGGUAUUAGAGUUUC | 936 | 2347 | GAAACUCUAAUACCCAAGG | 1159 |
| 2343 | CAACCAUGAAGUCUCUAAC | 937 | 2343 | CAACCAUGAAGUCUCUAAC | 937 | 2365 | GUUAGAGACUUCAUGGUUG | 1160 |
| 2361 | CAAUGUAUUUUCUUCACCU | 938 | 2361 | CAAUGUAUUUUCUUCACCU | 938 | 2383 | AGGUGAAGAAAAUACAUUG | 1161 |
| 2379 | UCUGCUACUCAAGUAGCAU | 939 | 2379 | UCUGCUACUCAAGUAGCAU | 939 | 2401 | AUGCUACUUGAGUAGCAGA | 1162 |
| 2397 | UUUACUGUGUCUUUGGUUU | 940 | 2397 | UUUACUGUGUCUUUGGUUU | 940 | 2419 | AAACCAAAGACACAGUAAA | 1163 |
| 2415 | UGUGCUAGGCCCCCGGGUG | 941 | 2415 | UGUGCUAGGCCCCCGGGUG | 941 | 2437 | CACCCGGGGGCCUAGCACA | 1164 |
| 2433 | GUGAAGCACAGACCCCUUC | 942 | 2433 | GUGAAGCACAGACCCCUUC | 942 | 2455 | GAAGGGGUCUGUGCUUCAC | 1165 |
| 2451 | CCAGGGGUUUACAGUCUAU | 943 | 2451 | CCAGGGGUUUACAGUCUAU | 943 | 2473 | AUAGACUGUAAACCCCUGG | 1166 |
| 2469 | UUUGAGACUCCUCAGUUCU | 944 | 2469 | UUUGAGACUCCUCAGUUCU | 944 | 2491 | AGAACUGAGGAGUCUCAAA | 1167 |
| 2487 | UUGCCACUUUUUUUUUUAA | 945 | 2487 | UUGCCACUUUUUUUUUUAA | 945 | 2509 | UUAAAAAAAAAAGUGGCAA | 1168 |
| 2505 | AUCUCCACCAGUCAUUUUU | 946 | 2505 | AUCUCCACCAGUCAUUUUU | 946 | 2527 | AAAAAUGACUGGUGGAGAU | 1169 |
| 2523 | UCAGACCUUUUAACUCCUC | 947 | 2523 | UCAGACCUUUUAACUCCUC | 947 | 2545 | GAGGAGUUAAAAGGUCUGA | 1170 |
| 2541 | CAAUUCCAACACUGAUUUC | 948 | 2541 | CAAUUCCAACACUGAUUUC | 948 | 2563 | GAAAUCAGUGUUGGAAUUG | 1171 |
| 2559 | CCCCUUUUGCAUUCUCCCU | 949 | 2559 | CCCCUUUUGCAUUCUCCCU | 949 | 2581 | AGGGAGAAUGCAAAAGGGG | 1172 |
| 2577 | UCCUUCCCUUCCUUGUAGC | 950 | 2577 | UCCUUCCCUUCCUUGUAGC | 950 | 2599 | GCUACAAGGAAGGGAAGGA | 1173 |
| 2595 | CCUUUUGACUUUCAUUGGA | 951 | 2595 | CCUUUUGACUUUCAUUGGA | 951 | 2617 | UCCAAUGAAAGUCAAAAGG | 1174 |
| 2613 | AAAUUAGGAUGUAAAUCUG | 952 | 2613 | AAAUUAGGAUGUAAAUCUG | 952 | 2635 | CAGAUUUACAUCCUAAUUU | 1175 |
| 2631 | GCUCAGGAGACCUGGAGGA | 953 | 2631 | GCUCAGGAGACCUGGAGGA | 953 | 2653 | UCCUCCAGGUCUCCUGAGC | 1176 |
| 2649 | AGCAGAGGAUAAUUAGCAU | 954 | 2649 | AGCAGAGGAUAAUUAGCAU | 954 | 2671 | AUGCUAAUUAUCCUCUGCU | 1177 |
| 2667 | UCUCAGGUUAAGUGUGAGU | 955 | 2667 | UCUCAGGUUAAGUGUGAGU | 955 | 2689 | ACUCACACUUAACCUGAGA | 1178 |
| 2685 | UAAUCUGAGAAACAAUGAC | 956 | 2685 | UAAUCUGAGAAACAAUGAC | 956 | 2707 | GUCAUUGUUUCUCAGAUUA | 1179 |
| 2703 | CUAAUUCUUGCAUAUUUUG | 957 | 2703 | CUAAUUCUUGCAUAUUUUG | 957 | 2725 | CAAAAUAUGCAAGAAUUAG | 1180 |
| 2721 | GUAACUUCCAUGUGAGGGU | 958 | 2721 | GUAACUUCCAUGUGAGGGU | 958 | 2743 | ACCCUCACAUGGAAGUUAC | 1181 |
| 2739 | UUUUCAGCAUUGAUAUUUG | 959 | 2739 | UUUUCAGCAUUGAUAUUUG | 959 | 2761 | CAAAUAUCAAUGCUGAAAA | 1182 |
| 2757 | GUGCAUUUUCUAAACAGAG | 960 | 2757 | GUGCAUUUUCUAAACAGAG | 960 | 2779 | CUCUGUUUAGAAAAUGCAC | 1183 |
| 2775 | GAUGAGGUGGUAUCUUCAC | 961 | 2775 | GAUGAGGUGGUAUCUUCAC | 961 | 2797 | GUGAAGAUACCACCUCAUC | 1184 |
| 2793 | CGUAGAACAUUGGUAUUCG | 962 | 2793 | CGUAGAACAUUGGUAUUCG | 962 | 2815 | CGAAUACCAAUGUUCUACG | 1185 |
| 2811 | GCUUGAGAAAAAAAGAAUA | 963 | 2811 | GCUUGAGAAAAAAAGAAUA | 963 | 2833 | UAUUCUUUUUUUCUCAAGC | 1186 |
| 2829 | AGUUGAACCUAUUUCUCUU | 964 | 2829 | AGUUGAACCUAUUUCUCUU | 964 | 2851 | AAGAGAAAUAGGUUCAACU | 1187 |
| 2847 | UUCUUUACAAGAUGGGUCC | 965 | 2847 | UUCUUUACAAGAUGGGUCC | 965 | 2869 | GGACCCAUCUUGUAAAGAA | 1188 |
| 2865 | CAGGAUUCCUCUUUUCUCU | 966 | 2865 | CAGGAUUCCUCUUUUCUCU | 966 | 2887 | AGAGAAAAGAGGAAUCCUG | 1189 |
| 2883 | UGCCAUAAAUGAUUAAUUA | 967 | 2883 | UGCCAUAAAUGAUUAAUUA | 967 | 2905 | UAAUUAAUCAUUUAUGGCA | 1190 |
| 2901 | AAAUAGCUUUUGUGUCUUA | 968 | 2901 | AAAUAGCUUUUGUGUCUUA | 968 | 2923 | UAAGACACAAAAGCUAUUU | 1191 |
| 2919 | ACAUUGGUAGCCAGCCAGC | 969 | 2919 | ACAUUGGUAGCCAGCCAGC | 969 | 2941 | GCUGGCUGGCUACCAAUGU | 1192 |
| 2937 | CCAAGGCUCUGUUUAUGCU | 970 | 2937 | CCAAGGCUCUGUUUAUGCU | 970 | 2959 | AGCAUAAACAGAGCCUUGG | 1193 |
| 2955 | UUUUGGGGGGCAUAUAUUG | 971 | 2955 | UUUUGGGGGGCAUAUAUUG | 971 | 2977 | CAAUAUAUGCCCCCCAAAA | 1194 |
| 2973 | GGGUUCCAUUCUCACCUAU | 972 | 2973 | GGGUUCCAUUCUCACCUAU | 972 | 2995 | AUAGGUGAGAAUGGAACCC | 1195 |
| 2991 | UCCACACAACAUAUCCGUA | 973 | 2991 | UCCACACAACAUAUCCGUA | 973 | 3013 | UACGGAUAUGUUGUGUGGA | 1196 |
| 3009 | AUAUAUCCCCUCUACUCUU | 974 | 3009 | AUAUAUCCCCUCUACUCUU | 974 | 3031 | AAGAGUAGAGGGGAUAUAU | 1197 |
| 3027 | UACUUCCCCCAAAUUUAAA | 975 | 3027 | UACUUCCCCCAAAUUUAAA | 975 | 3049 | UUUAAAUUUGGGGGAAGUA | 1198 |
| 3045 | AGAAGUAUGGGAAAUGAGA | 976 | 3045 | AGAAGUAUGGGAAAUGAGA | 976 | 3067 | UCUCAUUUCCCAUACUUCU | 1199 |
| 3063 | AGGCAUUUCCCCCACCCCA | 977 | 3063 | AGGCAUUUCCCCCACCCCA | 977 | 3085 | UGGGGUGGGGGAAAUGCCU | 1200 |
| 3081 | AUUUCUCUCCUCACACACA | 978 | 3081 | AUUUCUCUCCUCACACACA | 978 | 3103 | UGUGUGUGAGGAGAGAAAU | 1201 |
| 3099 | AGACUCAUAUUACUGGUAG | 979 | 3099 | AGACUCAUAUUACUGGUAG | 979 | 3121 | CUACCAGUAAUAUGAGUCU | 1202 |
| 3117 | GGAACUUGAGAACUUUAUU | 980 | 3117 | GGAACUUGAGAACUUUAUU | 980 | 3139 | AAUAAAGUUCUCAAGUUCC | 1203 |
| 3135 | UUCCAAGUUGUUCAAACAU | 981 | 3135 | UUCCAAGUUGUUCAAACAU | 981 | 3157 | AUGUUUGAACAACUUGGAA | 1204 |
| 3153 | UUUACCAAUCAUAUUAAUA | 982 | 3153 | UUUACCAAUCAUAUUAAUA | 982 | 3175 | UAUUAAUAUGAUUGGUAAA | 1205 |
| 3171 | ACAAUGAUGCUAUUUGCAA | 983 | 3171 | ACAAUGAUGCUAUUUGCAA | 983 | 3193 | UUGCAAAUAGCAUCAUUGU | 1206 |
| 3189 | AUUCCUGCUCCUAGGGGAG | 984 | 3189 | AUUCCUGCUCCUAGGGGAG | 984 | 3211 | CUCCCCUAGGAGCAGGAAU | 1207 |
| 3207 | GGGGAGAUAAGAAACCCUC | 985 | 3207 | GGGGAGAUAAGAAACCCUC | 985 | 3229 | GAGGGUUUCUUAUCUCCCC | 1208 |
| 3225 | CACUCUCUACAGGUUUGGG | 986 | 3225 | CACUCUCUACAGGUUUGGG | 986 | 3247 | CCCAAACCUGUAGAGAGUG | 1209 |
| 3243 | GUACAAGUGGCAACCUGCU | 987 | 3243 | GUACAAGUGGCAACCUGCU | 987 | 3265 | AGCAGGUUGCCACUUGUAC | 1210 |
| 3261 | UUCCAUGGCCGUGUAGAAG | 988 | 3261 | UUCCAUGGCCGUGUAGAAG | 988 | 3283 | CUUCUACACGGCCAUGGAA | 1211 |
| 3279 | GCAUGGUGCCCUGGCUUCU | 989 | 3279 | GCAUGGUGCCCUGGCUUCU | 989 | 3301 | AGAAGCCAGGGCACCAUGC | 1212 |
| 3297 | UCUGAGGAAGCUGGGGUUC | 990 | 3297 | UCUGAGGAAGCUGGGGUUC | 990 | 3319 | GAACCCCAGCUUCCUCAGA | 1213 |
| 3315 | CAUGACAAUGGCAGAUGUA | 991 | 3315 | CAUGACAAUGGCAGAUGUA | 991 | 3337 | UACAUCUGCCAUUGUCAUG | 1214 |
| 3333 | AAAGUUAUUCUUGAAGUCA | 992 | 3333 | AAAGUUAUUCUUGAAGUCA | 992 | 3355 | UGACUUCAAGAAUAACUUU | 1215 |
| 3351 | AGAUUGAGGCUGGGAGACA | 993 | 3351 | AGAUUGAGGCUGGGAGACA | 993 | 3373 | UGUCUCCCAGCCUCAAUCU | 1216 |
| 3369 | AGCCGUAGUAGAUGUUCUA | 994 | 3369 | AGCCGUAGUAGAUGUUCUA | 994 | 3391 | UAGAACAUCUACUACGGCU | 1217 |
| 3387 | ACUUUGUUCUGCUGUUCUC | 995 | 3387 | ACUUUGUUCUGCUGUUCUC | 995 | 3409 | GAGAACAGCAGAACAAAGU | 1218 |
| 3405 | CUAGAAAGAAUAUUUGGUU | 996 | 3405 | CUAGAAAGAAUAUUUGGUU | 996 | 3427 | AACCAAAUAUUCUUUCUAG | 1219 |
| 3423 | UUUCCUGUAUAGGAAUGAG | 997 | 3423 | UUUCCUGUAUAGGAAUGAG | 997 | 3445 | CUCAUUCCUAUACAGGAAA | 1220 |
| 3441 | GAUUAAUUCCUUUCCAGGU | 998 | 3441 | GAUUAAUUCCUUUCCAGGU | 998 | 3463 | ACCUGGAAAGGAAUUAAUC | 1221 |
| 3459 | UAUUUUAUAAUUCUGGGAA | 999 | 3459 | UAUUUUAUAAUUCUGGGAA | 999 | 3481 | UUCCCAGAAUUAUAAAAUA | 1222 |
| 3477 | AGCAAAACCCAUGCCUCCC | 1000 | 3477 | AGCAAAACCCAUGCCUCCC | 1000 | 3499 | GGGAGGCAUGGGUUUUGCU | 1223 |
| 3495 | CCCUAGCCAUUUUUACUGU | 1001 | 3495 | CCCUAGCCAUUUUUACUGU | 1001 | 3517 | ACAGUAAAAAUGGCUAGGG | 1224 |
| 3513 | UUAUCCUAUUUAGAUGGCC | 1002 | 3513 | UUAUCCUAUUUAGAUGGCC | 1002 | 3535 | GGCCAUCUAAAUAGGAUAA | 1225 |
| 3531 | CAUGAAGAGGAUGCUGUGA | 1003 | 3531 | CAUGAAGAGGAUGCUGUGA | 1003 | 3553 | UCACAGCAUCCUCUUCAUG | 1226 |
| 3549 | AAAUUCCCAACAAACAUUG | 1004 | 3549 | AAAUUCCCAACAAACAUUG | 1004 | 3571 | CAAUGUUUGUUGGGAAUUU | 1227 |
| 3567 | GAUGCUGACAGUCAUGCAG | 1005 | 3567 | GAUGCUGACAGUCAUGCAG | 1005 | 3589 | CUGCAUGACUGUCAGCAUC | 1228 |
| 3585 | GUCUGGGAGUGGGGAAGUG | 1006 | 3585 | GUCUGGGAGUGGGGAAGUG | 1006 | 3607 | CACUUCCCCACUCCCAGAC | 1229 |
| 3603 | GAUCUUUUGUUCCCAUCCU | 1007 | 3603 | GAUCUUUUGUUCCCAUCCU | 1007 | 3625 | AGGAUGGGAACAAAAGAUC | 1230 |
| 3621 | UCUUCUUUUAGCAGUAAAA | 1008 | 3621 | UCUUCUUUUAGCAGUAAAA | 1008 | 3643 | UUUUACUGCUAAAAGAAGA | 1231 |
| 3639 | AUAGCUGAGGGAAAAGGGA | 1009 | 3639 | AUAGCUGAGGGAAAAGGGA | 1009 | 3661 | UCCCUUUUCCCUCAGCUAU | 1232 |
| 3657 | AGGGAAAAGGAAGUUAUGG | 1010 | 3657 | AGGGAAAAGGAAGUUAUGG | 1010 | 3679 | CCAUAACUUCCUUUUCCCU | 1233 |
| 3675 | GGAAUACCUGUGGUGGUUG | 1011 | 3675 | GGAAUACCUGUGGUGGUUG | 1011 | 3697 | CAACCACCACAGGUAUUCC | 1234 |
| 3693 | GUGAUCCCUAGGUCUUGGG | 1012 | 3693 | GUGAUCCCUAGGUCUUGGG | 1012 | 3715 | CCCAAGACCUAGGGAUCAC | 1235 |
| 3711 | GAGCUCUUGGAGGUGUCUG | 1013 | 3711 | GAGCUCUUGGAGGUGUCUG | 1013 | 3733 | CAGACACCUCCAAGAGCUC | 1236 |
| 3729 | GUAUCAGUGGAUUUCCCAU | 1014 | 3729 | GUAUCAGUGGAUUUCCCAU | 1014 | 3751 | AUGGGAAAUCCACUGAUAC | 1237 |
| 3747 | UCCCCUGUGGGAAAUUAGU | 1015 | 3747 | UCCCCUGUGGGAAAUUAGU | 1015 | 3769 | ACUAAUUUCCCACAGGGGA | 1238 |
| 3765 | UAGGCUCAUUUACUGUUUU | 1016 | 3765 | UAGGCUCAUUUACUGUUUU | 1016 | 3787 | AAAACAGUAAAUGAGCCUA | 1239 |
| 3783 | UAGGUCUAGCCUAUGUGGA | 1017 | 3783 | UAGGUCUAGCCUAUGUGGA | 1017 | 3805 | UCCACAUAGGCUAGACCUA | 1240 |
| 3801 | AUUUUUUCCUAACAUACCU | 1018 | 3801 | AUUUUUUCCUAACAUACCU | 1018 | 3823 | AGGUAUGUUAGGAAAAAAU | 1241 |
| 3819 | UAAGCAAACCCAGUGUCAG | 1019 | 3819 | UAAGCAAACCCAGUGUCAG | 1019 | 3841 | CUGACACUGGGUUUGCUUA | 1242 |
| 3837 | GGAUGGUAAUUCUUAUUCU | 1020 | 3837 | GGAUGGUAAUUCUUAUUCU | 1020 | 3859 | AGAAUAAGAAUUACCAUCC | 1243 |
| 3855 | UUUCGUUCAGUUAAGUUUU | 1021 | 3855 | UUUCGUUCAGUUAAGUUUU | 1021 | 3877 | AAAACUUAACUGAACGAAA | 1244 |
| 3873 | UUCCCUUCAUCUGGGCACU | 1022 | 3873 | UUCCCUUCAUCUGGGCACU | 1022 | 3895 | AGUGCCCAGAUGAAGGGAA | 1245 |
| 3891 | UGAAGGGAUAUGUGAAACA | 1023 | 3891 | UGAAGGGAUAUGUGAAACA | 1023 | 3913 | UGUUUCACAUAUCCCUUCA | 1246 |
| 3909 | AAUGUUAACAUUUUUGGUA | 1024 | 3909 | AAUGUUAACAUUUUUGGUA | 1024 | 3931 | UACCAAAAAUGUUAACAUU | 1247 |
| 3927 | AGUCUUCAACCAGGGAUUG | 1025 | 3927 | AGUCUUCAACCAGGGAUUG | 1025 | 3949 | CAAUCCCUGGUUGAAGACU | 1248 |
| 3945 | GUUUCUGUUUAACUUCUUA | 1026 | 3945 | GUUUCUGUUUAACUUCUUA | 1026 | 3967 | UAAGAAGUUAAACAGAAAC | 1249 |
| [symbol] | [symbol] GGAAAGCUUGAGUAAA | 1027 | 3963 | AUAGGAAAGCUUGAGUAAA | 1027 | 3985 | UUUACUCAAGCUUUCCUAU | 1250 |
| 3981 | AAUAAAUAUUGUCUUUUUG | 1028 | 3981 | AAUAAAUAUUGUCUUUUUG | 1028 | 4003 | CAAAAAGACAAUAUUUAUU | 1251 |
| 3986 | AUAUUGUCUUUUUGUAUGU | 1029 | 3986 | AUAUUGUCUUUUUGUAUGU | 1029 | 4008 | ACAUACAAAAAGACAAUAU | 1252 |

The 3′-ends of the Upper sequence and the Lower sequence of the siNA construct can include an overhang sequence, for example about 1, 2, 3, or 4 nucleotides in length, preferably 2 nucleotides in length, wherein the overhanging sequence of the lower sequence is optionally complementary to a portion of the target sequence. The upper sequence is also referred to as the sense strand, whereas the lower sequence is also referred to as the antisense strand. The upper and lower sequences in the Table can further comprise a chemical modification having Formulae I-VII, such as exemplary siNA constructs shown in FIGS. 4 and 5, or having modifications described in Table IV or any combination thereof. [symbol]
indicates data missing or illegible when filed

TABLE III
Interleukin and Interleukin receptor Synthetic Modified siNA constructs

| | | | | | | |
|---|---|---|---|---|---|---|
| Tar- | | | | | | |
| get | | Seq | | | | Seq |
| Pos | Target | ID | Cmpd# | Aliases | Sequence | ID |

IL2RG

| | | | | | | |
|---|---|---|---|---|---|---|
| 118 | ACACCACAGCUGAUUUCUUCCUG | 1253 | | IL2RG: 120U21 sense siNA | ACCACAGCUGAUUUCUUCCTT | 1311 |
| 130 | AUUUCUUCCUGACCACUAUGCCC | 1254 | | IL2RG: 132U21 sense siNA | UUCUUCCUGACCACUAUGCTT | 1312 |
| 138 | CUGACCACUAUGCCCACUGACUC | 1255 | | IL2RG: 140U21 sense siNA | GACCACUAUGCCCACUGACTT | 1313 |
| 155 | UGACUCCCUCAGUGUUUCCACUC | 1256 | | IL2RG: 157U21 sense siNA | ACUCCCUCAGUGUUUCCACTT | 1314 |
| 262 | CCAACCUCACUCUGCAUUAUUGG | 1257 | | IL2RG: 264U21 sense siNA | AACCUCACUCUGCAUUAUUTT | 1315 |
| 302 | UGAUAAAGUCCAGAAGUGCAGCC | 1258 | | IL2RG: 304U21 sense siNA | AUAAAGUCCAGAAGUGCAGTT | 1316 |
| 303 | GAUAAAGUCCAGAAGUGCAGCCA | 1259 | | IL2RG: 305U21 sense siNA | UAAAGUCCAGAAGUGCAGCTT | 1317 |
| 344 | AAUCACUUCUGGCUGUCAGUUGC | 1260 | | IL2RG: 346U21 sense siNA | UCACUUCUGGCUGUCAGUUTT | 1318 |
| 118 | ACACCACAGCUGAUUUCUUCCUG | 1253 | | IL2RG: 138L21 antisense siNA | GGAAGAAAUCAGCUGUGGUTT | 1319 |
| | | | | (120C) | | |
| 130 | AUUUCUUCCUGACCACUAUGCCC | 1254 | | IL2RG: 150L21 antisense siNA | GCAUAGUGGUCAGGAAGAATT | 1320 |
| | | | | (132C) | | |
| 138 | CUGACCACUAUGCCCACUGACUC | 1255 | | IL2RG: 158L21 antisense siNA | GUCAGUGGGCAUAGUGGUCTT | 1321 |
| | | | | (140C) | | |
| 155 | UGACUCCCUCAGUGUUUCCACUC | 1256 | | IL2RG: 175L21 antisense siNA | GUGGAAACACUGAGGGAGUTT | 1322 |
| | | | | (157C) | | |
| 262 | CCAACCUCACUCUGCAUUAUUGG | 1257 | | IL2RG: 282L21 antisense siNA | AAUAAUGCAGAGUGAGGUUTT | 1323 |
| | | | | (264C) | | |
| 302 | UGAUAAAGUCCAGAAGUGCAGCC | 1258 | | IL2RG: 322L21 antisense siNA | CUGCACUUCUGGACUUUAUTT | 1324 |
| | | | | (304C) | | |
| 303 | GAUAAAGUCCAGAAGUGCAGCCA | 1259 | | IL2RG: 323L21 antisense siNA | GCUGCACUUCUGGACUUUATT | 1325 |
| | | | | (305C) | | |
| 344 | AAUCACUUCUGGCUGUCAGUUGC | 1260 | | IL2RG: 364L21 antisense siNA | AACUGACAGCCAGAAGUGATT | 1326 |
| | | | | (346C) | | |
| 118 | ACACCACAGCUGAUUUCUUCCUG | 1253 | | IL2RG: 120U21 sense siNA stab04 | B AccAcAGcuGAuuucuuccTT B | 1327 |
| 130 | AUUUCUUCCUGACCACUAUGCCC | 1254 | | IL2RG: 132U21 sense siNA stab04 | B uucuuccuGAccAcuAuGcTT B | 1328 |
| 138 | CUGACCACUAUGCCCACUGACUC | 1255 | | IL2RG: 140U21 sense siNA stab04 | B GAccAcuAuGcccAcuGAcTT B | 1329 |
| 155 | UGACUCCCUCAGUGUUUCCACUC | 1256 | | IL2RG: 157U21 sense siNA stab04 | B AcucccucAGuGuuuccAcTT B | 1330 |
| 262 | CCAACCUCACUCUGCAUUAUUGG | 1257 | | IL2RG: 264U21 sense siNA stab04 | B AAccucAcucuGcAuuAuuTT B | 1331 |
| 302 | UGAUAAAGUCCAGAAGUGCAGCC | 1258 | | IL2RG: 304U21 sense siNA stab04 | B AuAAAGuccAGAAGuGcAGTT B | 1332 |
| 303 | GAUAAAGUCCAGAAGUGCAGCCA | 1259 | | IL2RG: 305U21 sense siNA stab04 | B uAAAGuccAGAAGuGcAGcTT B | 1333 |
| 344 | AAUCACUUCUGGCUGUCAGUUGC | 1260 | | IL2RG: 346U21 sense siNA stab04 | B ucAcuucuGGcuGucAGuuTT B | 1334 |
| 118 | ACACCACAGCUGAUUUCUUCCUG | 1253 | | IL2RG: 138L21 antisense siNA | GGAAGAAAucAGcuGuGGuTsT | 1335 |
| | | | | (120C) stab05 | | |
| 130 | AUUUCUUCCUGACCACUAUGCCC | 1254 | | IL2RG: 150L21 antisense siNA | GcAuAGuGGucAGGAAGAATsT | 1336 |
| | | | | (132C) stab05 | | |
| 138 | CUGACCACUAUGCCCACUGACUC | 1255 | | IL2RG: 158L21 antisense siNA | GucAGuGGGcAuAGuGGuCTsT | 1337 |
| | | | | (140C) stab05 | | |
| 155 | UGACUCCCUCAGUGUUUCCACUC | 1256 | | IL2RG: 175L21 antisense siNA | GuGGAAAcAcuGAGGGAGuTsT | 1338 |
| | | | | (157C) stab05 | | |
| 262 | CCAACCUCACUCUGCAUUAUUGG | 1257 | | IL2RG: 282L21 antisense siNA | AAuAAuGcAGAGuGAGGuuTsT | 1339 |
| | | | | (264C) stab05 | | |
| 302 | UGAUAAAGUCCAGAAGUGCAGCC | 1258 | | IL2RG: 322L21 antisense siNA | cuGcAcuucuGGAcuuUAUTsT | 1340 |
| | | | | (304C) stab05 | | |
| 303 | GAUAAAGUCCAGAAGUGCAGCCA | 1259 | | IL2RG: 323L21 antisense siNA | GcuGcAcuucuGGAcuuuATsT | 1341 |
| | | | | (305C) stab05 | | |
| 344 | AAUCACUUCUGGCUGUCAGUUGC | 1260 | | IL2RG: 364L21 antisense siNA | AAcuGAcAGccAGAAGuGATsT | 1342 |
| | | | | (346C) stab05 | | |
| 118 | ACACCACAGCUGAUUUCUUCCUG | 1253 | | IL2RG: 120U21 sense siNA stab07 | B AccAcAGcuGAuuucuuccTT B | 1343 |
| 130 | AUUUCUUCCUGACCACUAUGCCC | 1254 | | IL2RG: 132U21 sense siNA stab07 | B uucuuccuGAccAcuAuGcTT B | 1344 |
| 138 | CUGACCACUAUGCCCACUGACUC | 1255 | | IL2RG: 140U21 sense siNA stab07 | B GAccAcuAuGcccAcuGAcTT B | 1345 |
| 155 | UGACUCCCUCAGUGUUUCCACUC | 1256 | | IL2RG: 157U21 sense siNA stab07 | B AcucccucAGuGuuuccAcTT B | 1346 |
| 262 | CCAACCUCACUCUGCAUUAUUGG | 1257 | | IL2RG: 264U21 sense siNA stab07 | B AAccucAcucuGcAuuAuuTT B | 1347 |
| 302 | UGAUAAAGUCCAGAAGUGCAGCC | 1258 | | IL2RG: 304U21 sense siNA stab07 | B AuAAAGuccAGAAGuGcAGTT B | 1348 |
| 303 | GAUAAAGUCCAGAAGUGCAGCCA | 1259 | | IL2RG: 305U21 sense siNA stab07 | B uAAAGuccAGAAGuGcAGcTT B | 1349 |
| 344 | AAUCACUUCUGGCUGUCAGUUGC | 1260 | | IL2RG: 346U21 sense siNA stab07 | B ucAcuucuGGcuGucAGuuTT B | 1350 |
| 118 | ACACCACAGCUGAUUUCUUCCUG | 1253 | | IL2RG: 138L21 antisense siNA | GGAAGAAAucAGcuGuGGuTsT | 1351 |
| | | | | (120C) stab11 | | |
| 130 | AUUUCUUCCUGACCACUAUGCCC | 1254 | | IL2RG: 150L21 antisense siNA | GcAuAGuGGucAGGAAGAATsT | 1352 |
| | | | | (132C) stab11 | | |
| 138 | CUGACCACUAUGCCCACUGACUC | 1255 | | IL2RG: 158L21 antisense siNA | GucAGuGGGcAuAGuGGucTsT | 1353 |
| | | | | (140C) stab11 | | |
| 155 | UGACUCCCUCAGUGUUUCCACUC | 1256 | | IL2RG: 175L21 antisense siNA | GuGGAAAcAcuGAGGGAGuTsT | 1354 |
| | | | | (157C) stab11 | | |
| 262 | CCAACCUCACUCUGCAUUAUUGG | 1257 | | IL2RG: 282L21 antisense siNA | AAuAAuGcAGAGuGAGGuuTsT | 1355 |
| | | | | (264C) stab11 | | |
| 302 | UGAUAAAGUCCAGAAGUGCAGCC | 1258 | | IL2RG: 322L21 antisense siNA | cuGcAcuucuGGAcuuuAuTsT | 1356 |
| | | | | (304C) stab11 | | |
| 303 | GAUAAAGUCCAGAAGUGCAGCCA | 1259 | | IL2RG: 323L21 antisense siNA | GcuGcAcuucuGGAcuuuATsT | 1357 |
| | | | | (305C) stab11 | | |
| 344 | AAUCACUUCUGGCUGUCAGUUGC | 1260 | | IL2RG: 364L21 antisense siNA | AAcuGAcAGccAGAAGuGATsT | 1358 |
| | | | | (346C) stab11 | | |
| 118 | ACACCACAGCUGAUUUCUUCCUG | 1253 | | IL2RG: 120U21 sense siNA stab18 | B AccAcAGcuGAuuucuuccTT B | 1359 |
| 130 | AUUUCUUCCUGACCACUAUGCCC | 1254 | | IL2RG: 132U21 sense siNA stab18 | B uucuuccuGAccAcuAuGcTT B | 1360 |
| 138 | CUGACCACUAUGCCCACUGACUC | 1255 | | IL2RG: 140U21 sense siNA stab18 | B GAccAcuAuGcccAcuGAcTT B | 1361 |
| 155 | UGACUCCCUCAGUGUUUCCACUC | 1256 | | IL2RG: 157U21 sense siNA stab18 | B AcucccucAGuGuuuccAcTT B | 1362 |
| 262 | CCAACCUCACUCUGCAUUAUUGG | 1257 | | IL2RG: 264U21 sense siNA stab18 | B AAccucAcucuGcAuuAuuTT B | 1363 |
| 302 | UGAUAAAGUCCAGAAGUGCAGCC | 1258 | | IL2RG: 304U21 sense siNA stab18 | B AuAAAGuccAGAAGuGcAGTT B | 1364 |
| 303 | GAUAAAGUCCAGAAGUGCAGCCA | 1259 | | IL2RG: 305U21 sense siNA stab18 | B uAAAGuccAGAAGuGcAGcTT B | 1365 |
| 344 | AAUCACUUCUGGCUGUCAGUUGC | 1260 | | IL2RG: 346U21 sense siNA stab18 | B ucAcuucuGGcuGucAGuuTT B | 1366 |
| 118 | ACACCACAGCUGAUUUCUUCCUG | 1253 | | IL2RG: 138L21 antisense siNA | GGAAGAAAucAGcuGuGGuTsT | 1367 |
| | | | | (120C) stab08 | | |
| 130 | AUUUCUUCCUGACCACUAUGCCC | 1254 | | IL2RG: 150L21 antisense siNA | GcAuAGuGGucAGGAAGAATsT | 1368 |
| | | | | (132C) stab08 | | |
| 138 | CUGACCACUAUGCCCACUGACUC | 1255 | | IL2RG: 158L21 antisense siNA | GucAGuGGGcAuAGuGGuGTsT | 1369 |
| | | | | (140C) stab08 | | |
| 155 | UGACUCCCUCAGUGUUUCCACUC | 1256 | | IL2RG: 175L21 antisense siNA | GuGGAAAcAcuGAGGGAGuTsT | 1370 |
| | | | | (157C) stab08 | | |
| 262 | CCAACCUCACUCUGCAUUAUUGG | 1257 | | IL2RG: 282L21 antisense siNA | AAuAAuGcAGAGuGAGGuuTsT | 1371 |
| | | | | (264C) stab08 | | |
| 302 | UGAUAAAGUCCAGAAGUGCAGCC | 1258 | | IL2RG: 322L21 antisense siNA | cuGcAcuucuGGAcuuuAuTsT | 1372 |
| | | | | (304C) stab08 | | |
| 303 | GAUAAAGUCCAGAAGUGCAGCCA | 1259 | | IL2RG: 323L21 antisense siNA | GcuGcAcuucuGGAcuuuATsT | 1373 |
| | | | | (305C) stab08 | | |
| 344 | AAUCACUUCUGGCUGUCAGUUGC | 1260 | | IL2RG: 364L21 antisense siNA | AAcuGAcAGccAGAAGuGATsT | 1374 |
| | | | | (346C) stab08 | | |
| 118 | ACACCACAGCUGAUUUCUUCCUG | 1253 | | IL2RG: 120U21 sense siNA stab09 | B ACCACAGCUGAUUUCUUCCTT B | 1375 |
| 130 | AUUUCUUCCUGACCACUAUGCCC | 1254 | | IL2RG: 132U21 sense siNA stab09 | B UUCUUCCUGACCACUAUGCTT B | 1376 |
| 138 | CUGACCACUAUGCCCACUGACUC | 1255 | | IL2RG: 140U21 sense siNA stab09 | B GACCACUAUGCCCACUGACTT B | 1377 |
| 155 | UGACUCCCUCAGUGUUUCCACUC | 1256 | | IL2RG: 157U21 sense siNA stab09 | B ACUCCCUCAGUGUUUCCACTT B | 1378 |
| 262 | CCAACCUCACUCUGCAUUAUUGG | 1257 | | IL2RG: 264U21 sense siNA stab09 | B AACCUCACUCUGCAUUAUUTT B | 1379 |
| 302 | UGAUAAAGUCCAGAAGUGCAGCC | 1258 | | IL2RG: 304U21 sense siNA stab09 | B AUAAAGUCCAGAAGUGCAGTT B | 1380 |
| 303 | GAUAAAGUCCAGAAGUGCAGCCA | 1259 | | IL2RG: 305U21 sense siNA stab09 | B UAAAGUCCAGAAGUGCAGCTT B | 1381 |
| 344 | AAUCACUUCUGGCUGUCAGUUGC | 1260 | | IL2RG: 346U21 sense siNA stab09 | B UCACUUCUGGCUGUCAGUUTT B | 1382 |
| 118 | ACACCACAGCUGAUUUCUUCCUG | 1253 | | IL2RG: 138L21 antisense siNA | GGAAGAAAUCAGCUGUGGUTsT | 1383 |
| | | | | (120C) stab10 | | |
| 130 | AUUUCUUCCUGACCACUAUGCCC | 1254 | | IL2RG: 150L21 antisense siNA | GCAUAGUGGUCAGGAAGAATsT | 1384 |
| | | | | (132C) stab10 | | |
| 138 | CUGACCACUAUGCCCACUGACUC | 1255 | | IL2RG: 158L21 antisense siNA | GUCAGUGGGCAUAGUGGUCTsT | 1385 |
| | | | | (140C) stab10 | | |
| 155 | UGACUCCCUCAGUGUUUCCACUC | 1256 | | IL2RG: 175L21 antisense siNA | GUGGAAACACUGAGGGAGUTsT | 1386 |
| | | | | (157C) stab10 | | |
| 262 | CCAACCUCACUCUGCAUUAUUGG | 1257 | | IL2RG: 282L21 antisense siNA | AAUAAUGCAGAGUGAGGUUTsT | 1387 |
| | | | | (264C) stab10 | | |
| 302 | UGAUAAAGUCCAGAAGUGCAGCC | 1258 | | IL2RG: 322L21 antisense siNA | CUGCACUUCUGGACUUUAUTsT | 1388 |
| | | | | (304C) stab10 | | |
| 303 | GAUAAAGUCCAGAAGUGCAGCCA | 1259 | | IL2RG: 323L21 antisense siNA | GCUGCACUUCUGGACUUUATsT | 1389 |
| | | | | (305C) stab10 | | |
| 344 | AAUCACUUCUGGCUGUCAGUUGC | 1260 | | IL2RG: 364L21 antisense siNA | AACUGACAGCCAGAAGUGATsT | 1390 |
| | | | | (346C) stab10 | | |
| 118 | ACACCACAGCUGAUUUCUUCCUG | 1253 | | IL2RG: 138L21 antisense siNA | GGAAGAAAucAGCuGuGGuTT B | 1391 |
| | | | | (120C) stab19 | | |
| 130 | AUUUCUUCCUGACCACUAUGCCC | 1254 | | IL2RG: 150L21 antisense siNA | GcAuAGuGGucAGGAAGAATT B | 1392 |
| | | | | (132C) stab19 | | |
| 138 | CUGACCACUAUGCCCACUGACUC | 1255 | | IL2RG: 158L21 antisense siNA | GucAGuGGGCAuAGuGGucTT B | 1393 |
| | | | | (140C) stab19 | | |
| 155 | UGACUCCCUCAGUGUUUCCACUC | 1256 | | IL2RG: 175L21 antisense siNA | GuGGAAACAcuGAGGGAGuTT B | 1394 |
| | | | | (157C) stab19 | | |
| 262 | CCAACCUCACUCUGCAUUAUUGG | 1257 | | IL2RG: 282L21 antisense siNA | AAuAAuGCAGAGuGAGGuUTT B | 1395 |
| | | | | (264C) stab19 | | |
| 302 | UGAUAAAGUCCAGAAGUGCAGCC | 1258 | | IL2RG: 322L21 antisense siNA | cuGcAcuucuGGAcuuuAuTT B | 1396 |
| | | | | (304C) stab19 | | |
| 303 | GAUAAAGUCCAGAAGUGCAGCCA | 1259 | | IL2RG: 323L21 antisense siNA | GcuGcAcuucuGGAcuuuATT B | 1397 |
| | | | | (305C) stab19 | | |
| 344 | AAUCACUUCUGGCUGUCAGUUGC | 1260 | | IL2RG: 364L21 antisense siNA | AAcuGAcAGcCAGAAGuGATT B | 1398 |
| | | | | (346C) stab19 | | |
| 118 | ACACCACAGCUGAUUUCUUCCUG | 1253 | | IL2RG: 138L21 antisense siNA | GGAAGAAAUCAGCUGUGGUTT B | 1399 |
| | | | | (120C) stab22 | | |
| 130 | AUUUCUUCCUGACCACUAUGCCC | 1254 | | IL2RG: 150L21 antisense siNA | GCAUAGUGGUCAGGAAGAATT B | 1400 |
| | | | | (132C) stab22 | | |
| 138 | CUGACCACUAUGCCCACUGACUC | 1255 | | IL2RG: 158L21 antisense siNA | GUCAGUGGGCAUAGUGGUCTT B | 1401 |
| | | | | (140C) stab22 | | |
| 155 | UGACUCCCUCAGUGUUUCCACUC | 1256 | | IL2RG: 175L21 antisense siNA | GUGGAAACACUGAGGGAGUTT B | 1402 |
| | | | | (157C) stab22 | | |
| 262 | CCAACCUCACUCUGCAUUAUUGG | 1257 | | IL2RG: 282L21 antisense siNA | AAUAAUGCAGAGUGAGGUUTT B | 1403 |
| | | | | (264C) stab22 | | |
| 302 | UGAUAAAGUCCAGAAGUGCAGCC | 1258 | | IL2RG: 322L21 antisense siNA | CUGCACUUCUGGACUUUAUTT B | 1404 |
| | | | | (304C) stab22 | | |
| 303 | GAUAAAGUCCAGAAGUGCAGCCA | 1259 | | IL2RG: 323L21 antisense siNA | GCUGCACUUCUGGACUUUATT B | 1405 |
| | | | | (305C) stab22 | | |
| 344 | AAUCACUUCUGGCUGUCAGUUGC | 1260 | | IL2RG: 364L21 antisense siNA | AACUGACAGCCAGAAGUGATT B | 1406 |
| | | | | (346C) stab22 | | |
| IL4 | | | | | | |
| 487 | CAGCCUCACAGAGCAGAAGACUC | 1269 | | IL4: 489U21 sense siNA | GCCUCACAGAGCAGAAGACTT | 1407 |
| 489 | GCCUCACAGAGCAGAAGACUCUG | 1270 | | IL4: 491U21 sense siNA | CUCACAGAGCAGAAGACUCTT | 1408 |
| 516 | CCGAGUUGACCGUAACAGACAUC | 1271 | | IL4: 518U21 sense siNA | GAGUUGACCGUAACAGACATT | 1409 |
| 526 | CGUAACAGACAUCUUUGCUGCCU | 1272 | | IL4: 528U21 sense siNA | UAACAGACAUCUUUGCUGCTT | 1410 |
| 545 | GCCUCCAAGAACACAACUGAGAA | 1273 | | IL4: 547U21 sense siNA | CUCCAAGAACACAACUGAGTT | 1411 |
| 606 | UCUACAGCCACCAUGAGAAGGAC | 1274 | | IL4: 608U21 sense siNA | UACAGCCACCAUGAGAAGGTT | 1412 |
| 728 | UUGAAUUCCUGUCCUGUGAAGGA | 1275 | | IL4: 730U21 sense siNA | GAAUUCCUGUCCUGUGAAGTT | 1413 |
| 745 | GAAGGAAGCCAACCAGAGUACGU | 1276 | | IL4: 747U21 sense siNA | AGGAAGCCAACCAGAGUACTT | 1414 |
| 487 | CAGCCUCACAGAGCAGAAGACUC | 1269 | | IL4: 507L21 antisense siNA | GUCUUCUGCUCUGUGAGGCTT | 1415 |
| | | | | (489C) | | |
| 489 | GCCUCACAGAGCAGAAGACUCUG | 1270 | | IL4: 509L21 antisense siNA | GAGUCUUCUGCUCUGUGAGTT | 1416 |
| | | | | (491C) | | |
| 516 | CCGAGUUGACCGUAACAGACAUC | 1271 | | IL4: 536L21 antisense siNA | UGUCUGUUACGGUCAACUCTT | 1417 |
| | | | | (518C) | | |
| 526 | CGUAACAGACAUCUUUGCUGCCU | 1272 | | IL4: 546L21 antisense siNA | GCAGCAAAGAUGUCUGUUATT | 1418 |
| | | | | (528C) | | |
| 545 | GCCUCCAAGAACACAACUGAGAA | 1273 | | IL4: 565L21 antisense siNA | CUCAGUUGUGUUCUUGGAGTT | 1419 |
| | | | | (547C) | | |
| 606 | UCUACAGCCACCAUGAGAAGGAC | 1274 | | IL4: 626L21 antisense siNA | CCUUCUCAUGGUGGCUGUATT | 1420 |
| | | | | (608C) | | |
| 728 | UUGAAUUGCUGUCCUGUGAAGGA | 1275 | | IL4: 748L21 antisense siNA | CUUCACAGGACAGGAAUUCTT | 1421 |
| | | | | (730C) | | |
| 745 | GAAGGAAGCCAACCAGAGUACGU | 1276 | | IL4: 765L21 antisense siNA | GUACUCUGGUUGGCUUCCUTT | 1422 |
| | | | | (747C) | | |
| 487 | CAGCCUCACAGAGCAGAAGACUC | 1269 | | IL4: 489U21 sense siNA stab04 | B GccucAcAGAGcAGAAGACTT B | 1423 |
| 489 | GCCUCACAGAGCAGAAGACUCUG | 1270 | | IL4: 491U21 sense siNA stab04 | B cucAcAGAGcAGAAGAcuc1T B | 1424 |
| 516 | CCGAGUUGACCGUAACAGACAUC | 1271 | | IL4: 518U21 sense siNA stab04 | B GAGuuGAccGuAAcAGAcATT B | 1425 |
| 526 | CGUAACAGACAUCUUUGCUGCCU | 1272 | | IL4: 528U21 sense siNA stab04 | B uAAcAGAcAucuuuGcuGcTT B | 1426 |
| 545 | GCCUCCAAGAACACAACUGAGAA | 1273 | | IL4: 547U21 sense siNA stab04 | B cuccAAGAAcACAACuGAGTT B | 1427 |
| 606 | UCUACAGCCACCAUGAGAAGGAC | 1274 | | IL4: 608U21 sense siNA stab04 | B uAcAGccAccAuGAGAAGGTT B | 1428 |
| 728 | UUGAAUUCCUGUCCUGUGAAGGA | 1275 | | IL4: 730U21 sense siNA stab04 | B GAAuuccuGuccuGuGAAGTT B | 1429 |
| 745 | GAAGGAAGCCAACCAGAGUACGU | 1276 | | IL4: 747U21 sense siNA stab04 | B AGGAAGccAAccAGAGuAcTT B | 1430 |
| 487 | CAGCCUCACAGAGCAGAAGACUC | 1269 | | IL4: 507L21 antisense siNA | GucuucuGcucuGuGAGGcTsT | 1431 |
| | | | | (489C) stab05 | | |
| 489 | GCCUCACAGAGCAGAAGACUCUG | 1270 | | IL4: 509L21 antisense siNA | GAGucuucuGcucuGuGAGTsT | 1432 |
| | | | | (491C) stab05 | | |
| 516 | CCGAGUUGACCGUAACAGACAUC | 1271 | | IL4: 536L21 antisense siNA | uGucuGuuAcGGucMcuoTsT | 1433 |
| | | | | (518C) stab05 | | |
| 526 | CGUAACAGACAUCUUUGCUGCCU | 1272 | | IL4: 546L21 antisense siNA | GcAGcAAAGAUGuCuGuuATsT | 1434 |
| | | | | (528C) stab05 | | |
| 545 | GCCUCCAAGAACACAACUGAGAA | 1273 | | IL4: 565L21 antisense siNA | cucAGuuGuGuucuuGGAGTsT | 1435 |
| | | | | (547C) stab05 | | |
| 606 | UCUACAGCCACCAUGAGAAGGAC | 1274 | | IL4: 626L21 antisense siNA | ccuucucAuGGuGGcuGuATsT | 1436 |
| | | | | (608C) stab05 | | |
| 728 | UUGAAUUCCUGUCCUGUGAAGGA | 1275 | | IL4: 748L21 antisense siNA | cuucAcAGGAcAGGAAuucTsT | 1437 |
| | | | | (730C) stab05 | | |
| 745 | GAAGGAAGCCAACCAGAGUACGU | 1276 | | IL4: 765L21 antisense siNA | GuAcucuGGuuGgcuuccuTsT | 1438 |
| | | | | (747C) stab05 | | |
| 487 | CAGCCUCACAGAGCAGAAGACUC | 1269 | | IL4: 489U21 sense siNA stab07 | B GccucAcAGAGcAGAAGAcTT B | 1439 |
| 489 | GCCUCACAGAGCAGAAGACUCUG | 1270 | | IL4: 491U21 sense siNA stab07 | B cucAcAGAGcAGAAGAcucTT B | 1440 |
| 516 | CCGAGUUGACCGUAACAGACAUC | 1271 | | IL4: 518U21 sense siNA stab07 | B GAGuuGAccGuAAcAGAcATT B | 1441 |
| 526 | CGUAACAGACAUCUUUGCUGCCU | 1272 | | IL4: 528U21 sense siNA stab07 | B uAAcAGAcAucuuuGcuGcTT B | 1442 |
| 545 | GCCUCCAAGAACACAACUGAGAA | 1273 | | IL4: 547U21 sense siNA stab07 | B cuccAAGAAcAcAACuGAGTT B | 1443 |
| 606 | UCUACAGCCAGCAUGAGAAGGAC | 1274 | | IL4: 608U21 sense siNA stab07 | B uAcAGccAccAuGAGAAGGTT B | 1444 |
| 728 | UUGAAUUCCUGUCCUGUGAAGGA | 1275 | | IL4: 730U21 sense siNA stab07 | B GAAuuccuGuccuGuGAAGTT B | 1445 |
| 745 | GAAGGAAGCCAACCAGAGUACGU | 1276 | | IL4: 747U21 sense siNA stab07 | B AGGAAGccAAccAGAGuAcTT B | 1446 |
| 487 | CAGCCUCACAGAGCAGAAGACUC | 1269 | | IL4: 507L21 antisense siNA | GucuucuGcucuGuGAGGcTsT | 1447 |
| | | | | (489C) stab11 | | |
| 489 | GCCUCACAGAGCAGAAGACUCUG | 1270 | | IL4: 509L21 antisense siNA | GAGucuucuGcucuGuGAGTsT | 1448 |
| | | | | (491C) stab11 | | |
| 516 | CCGAGUUGACCGUAACAGACAUC | 1271 | | IL4: 536L21 antisense siNA | uGucuGuuAcGGucAAcucTsT | 1449 |
| | | | | (518C) stab11 | | |
| 526 | CGUAACAGACAUCUUUGCUGCCU | 1272 | | IL4: 546L21 antisense siNA | GcAGcAAAGAuGucuGuuATsT | 1450 |
| | | | | (528C) stab11 | | |
| 545 | GCCUCCAAGAACACAACUGAGAA | 1273 | | IL4: 565L21 antisense siNA | cucAGuuGuGuucuuGGAGTsT | 1451 |
| | | | | (547C) stab11 | | |
| 606 | UCUACAGCCACCAUGAGAAGGAC | 1274 | | IL4: 626L21 antisense siNA | ccuucucAuGGuGGcuGuATsT | 1452 |
| | | | | (608C) stab11 | | |
| 728 | UUGAAUUCCUGUCCUGUGAAGGA | 1275 | | IL4: 748L21 antisense siNA | cuucAcAGGAcAGGAAuucTsT | 1453 |
| | | | | (730C) stab11 | | |
| 745 | GAAGGAAGCCAACCAGAGUACGU | 1276 | | IL4: 765L21 antisense siNA | GuAcucuGGuuGGcuuccuTsT | 1454 |
| | | | | (747C) stab11 | | |
| 487 | CAGCCUCACAGAGCAGAAGACUC | 1269 | | IL4: 489U21 sense siNA stab18 | B GccucAcAGAGcAGAAGAcTT B | 1455 |
| 489 | GCCUCACAGAGCAGAAGACUCUG | 1270 | | IL4: 491U21 sense siNA stab18 | B cucAcAGAGcAGAAGAcucTT B | 1456 |
| 516 | CCGAGUUGACCGUAACAGACAUC | 1271 | | IL4: 518U21 sense siNA stab18 | B GAGuuGAccGuAAcAGAcATT B | 1457 |
| 526 | CGUAACAGACAUCUUUGCUGCCU | 1272 | | IL4: 528U21 sense siNA stab18 | B uAAcAGAcAucuuuGcuGcTT B | 1458 |
| 545 | GCCUCCAAGAACACAACUGAGAA | 1273 | | IL4: 547U21 sense siNA stab18 | B cuccAAGAAcAcAAcuGAGTT B | 1459 |
| 606 | UCUACAGCCACCAUGAGAAGGAC | 1274 | | IL4: 608U21 sense siNA stab18 | B uAcAGccAccAuGAGAAGGTT B | 1460 |
| 728 | UUGAAUUGCUGUCCUGUGAAGGA | 1275 | | IL4: 730U21 sense siNA stab18 | B GAAuuccuGuccuGuGAAGTT B | 1461 |
| 745 | GAAGGAAGCCAACCAGAGUACGU | 1276 | | IL4: 747U21 sense siNA stab18 | B AGGAAGccAAccAGAGuAcTT B | 1462 |
| 487 | CAGCCUCACAGAGCAGAAGACUC | 1269 | | IL4: 507L21 antisense siNA | GucuucuGcucuGuGAGGcTsT | 1463 |
| | | | | (489C) stab08 | | |
| 489 | GCCUCACAGAGCAGAAGACUCUG | 1270 | | IL4: 509L21 antisense siNA | GAGucuucuGcucuGuGAGTsT | 1464 |
| | | | | (491C) stab08 | | |
| 516 | CCGAGUUGACCGUAACAGACAUC | 1271 | | IL4: 536L21 antisense siNA | uGucuGuuAcGGucAAcucTsT | 1465 |
| | | | | (518C) stab08 | | |
| 526 | CGUAACAGACAUCUUUGCUGCCU | 1272 | | IL4: 546L21 antisense siNA | GcAGcAAAGAuGucuGuuATsT | 1466 |
| | | | | (528C) stab08 | | |
| 545 | GCCUCCAAGAACACAACUGAGAA | 1273 | | IL4: 565L21 antisense siNA | cucAGuuGuGuucuuGGAGTsT | 1467 |
| | | | | (547C) stab08 | | |
| 606 | UCUACAGCCACCAUGAGAAGGAC | 1274 | | IL4: 626L21 antisense siNA | ccuucucAuGGuGGcuGuATsT | 1468 |
| | | | | (608C) stab08 | | |
| 728 | UUGAAUUCCUGUCCUGUGAAGGA | 1275 | | IL4: 748L21 antisense siNA | cuucAcAGGAcAGGAAuucTsT | 1469 |
| | | | | (730C) stab08 | | |
| 745 | GAAGGAAGCCAACCAGAGUACGU | 1276 | | IL4: 765L21 antisense siNA | GuAcucuGGuuGGcuuccuTsT | 1470 |
| | | | | (747C) stab08 | | |
| 487 | CAGCCUCACAGAGCAGAAGACUC | 1269 | | IL4: 489U21 sense siNA stab09 | B GCCUCACAGAGCAGAAGACTT B | 1471 |
| 489 | GCCUCACAGAGCAGAAGACUCUG | 1270 | | IL4: 491U21 sense siNA stab09 | B CUCACAGAGCAGAAGACUCTT B | 1472 |
| 516 | CCGAGUUGACCGUAACAGACAUC | 1271 | | IL4: 518U21 sense siNA stab09 | B GAGUUGACCGUAACAGACATT B | 1473 |
| 526 | CGUAACAGACAUCUUUGCUGCCU | 1272 | | IL4: 528U21 sense siNA stab09 | B UAACAGACAUCUUUGCUGCTT B | 1474 |
| 545 | GCCUCCAAGAACACAACUGAGAA | 1273 | | IL4: 547U21 sense siNA stab09 | B CUCCAAGAACACAACUGAGTT B | 1475 |
| 606 | UCUACAGCCACCAUGAGAAGGAC | 1274 | | IL4: 608U21 sense siNA stab09 | B UACAGCCACCAUGAGAAGGTT B | 1476 |
| 728 | UUGAAUUCCUGUCCUGUGAAGGA | 1275 | | IL4: 730U21 sense siNA stab09 | B GAAUUCCUGUCCUGUGAAGTT B | 1477 |
| 745 | GAAGGAAGCCAACCAGAGUACGU | 1276 | | IL4: 747U21 sense siNA stab09 | B AGGAAGCCAACCAGAGUACTT B | 1478 |
| 487 | CAGCCUCACAGAGCAGAAGACUC | 1269 | | IL4: 507L21 antisense siNA | GUCUUCUGCUCUGUGAGGCTsT | 1479 |
| | | | | (489C) stab10 | | |
| 489 | GCCUCACAGAGCAGAAGACUCUG | 1270 | | IL4: 509L21 antisense siNA | GAGUCUUCUGCUCUGUGAGTsT | 1480 |
| | | | | (491C) stab10 | | |
| 516 | CCGAGUUGACCGUAACAGACAUC | 1271 | | IL4: 536L21 antisense siNA | UGUCUGUUACGGUCAACUCTsT | 1481 |
| | | | | (518C) stab10 | | |
| 526 | CGUAACAGACAUCUUUGCUGCCU | 1272 | | IL4: 546L21 antisense siNA | GCAGCAAAGAUGUCUGUUATsT | 1482 |
| | | | | (528C) stab10 | | |
| 545 | GCCUCCAAGAACACAACUGAGAA | 1273 | | IL4: 565L21 antisense siNA | CUCAGUUGUGUUCUUGGAGTsT | 1483 |
| | | | | (547C) stab10 | | |
| 606 | UCUACAGCCACCAUGAGAAGGAC | 1274 | | IL4: 626L21 antisense siNA | CCUUCUCAUGGUGGCUGUATsT | 1484 |
| | | | | (608C) stab10 | | |
| 728 | UUGAAUUCCUGUCCUGUGAAGGA | 1275 | | IL4: 748L21 antisense siNA | CUUCACAGGACAGGAAUUCTsT | 1485 |
| | | | | (730C) stabl 0 | | |
| 745 | GAAGGAAGCCAACCAGAGUACGU | 1276 | | IL4: 765L21 antisense siNA | GUACUCUGGUUGGCUUCCUTsT | 1486 |
| | | | | (747C) stab10 | | |
| 487 | CAGCCUCACAGAGCAGAAGACUC | 1269 | | IL4: 507L21 antisense siNA | GucuucuGcucuGuGAGGcTT B | 1487 |
| | | | | (489C) stab19 | | |
| 489 | GCCUCACAGAGCAGAAGACUCUG | 1270 | | IL4: 509L21 antisense siNA | GAGucuucuGcucuGuGAGTT B | 1488 |
| | | | | (491C) stab19 | | |
| 516 | CCGAGUUGACCGUAACAGACAUC | 1271 | | IL4: 536L21 antisense siNA | uGucuGuuAcGGucAAcucTT B | 1489 |
| | | | | (518C) stab19 | | |
| 526 | CGUAACAGACAUCUUUGCUGCCU | 1272 | | IL4: 546L21 antisense siNA | GcAGcAAAGAuGucuGuuATT B | 1490 |
| | | | | (528C) stab19 | | |
| 545 | GCCUCCAAGAACACAACUGAGAA | 1273 | | IL4: 565L21 antisense siNA | cucAGuuGuGuucuuGGAGTT B | 1491 |
| | | | | (547C) stab19 | | |
| 606 | UCUACAGCCACCAUGAGAAGGA | 1274 | | IL4: 626L21 antisense siNA | ccuucucAuGGuGGcuGuATT B | 1492 |
| | | | | (608C) stab19 | | |
| 728 | UUGAAUUCCUGUCCUGUGAAGGA | 1275 | | IL4: 748L21 antisense siNA | cuucAcAGGAcAGGAAuucTT B | 1493 |
| | | | | (730C) stab19 | | |
| 745 | GAAGGAAGCCAACCAGAGUACGU | 1276 | | IL4: 765L21 antisense siNA | GuAcucuGGuuGGcuuccuTT B | 1494 |
| | | | | (747C) stab19 | | |
| 487 | CAGCCUCACAGAGCAGAAGACUC | 1269 | | IL4: 507L21 antisense siNA | GUCUUCUGCUCUGUGAGGCTT B | 1495 |
| | | | | (489C) stab22 | | |
| 489 | GCCUCACAGAGCAGAAGACUCUG | 1270 | | IL4: 509L21 antisense siNA | GAGUCUUCUGCUCUGUGAGTT B | 1496 |
| | | | | (491C) stab22 | | |
| 516 | CCGAGUUGACCGUAACAGACAUC | 1271 | | IL4: 536L21 antisense siNA | UGUCUGUUACGGUCAACUCTT B | 1497 |
| | | | | (518C) stab22 | | |
| 526 | CGUAACAGACAUCUUUGCUGCCU | 1272 | | IL4: 546L21 antisense siNA | GCAGCAAAGAUGUCUGUUATT B | 1498 |
| | | | | (528C) stab22 | | |
| 545 | GCCUCCAAGAACACAACUGAGAA | 1273 | | IL4: 565L21 antisense siNA | CUCAGUUGUGUUCUUGGAGTT B | 1499 |
| | | | | (547C) stab22 | | |
| 606 | UCUACAGCCACCAUGAGAAGGAC | 1274 | | IL4: 626L21 antisense siNA | CCUUCUCAUGGUGGCUGUATT B | 1500 |
| | | | | (608C) stab22 | | |
| 728 | UUGAAUUCCUGUCCUGUGAAGGA | 1275 | | IL4: 748L21 antisense siNA | CUUCACAGGACAGGAAUUCTT B | 1501 |
| | | | | (730C) stab22 | | |
| 745 | GAAGGAAGCCAACCAGAGUACGU | 1276 | | IL4: 765L21 antisense siNA | GUACUCUGGUUGGCUUCCUTT B | 1502 |
| | | | | (747C) stab22 | | |
| IL4R | | | | | | |
| 469 | CUAUACACUGGACCUGUGGGCUG | 1277 | | IL4R: 471U21 sense siNA | AUACACUGGACCUGUGGGCTT | 1503 |
| 551 | CCAGGAAACCUGACAGUUCACAC | 1278 | | IL4R: 553U21 sense siNA | AGGAAACCUGACAGUUCACTT | 1504 |
| 1119 | AGCACAACAUGAAAAGGGAUGAA | 1279 | | IL4R: 1121U21 sense siNA | CACAACAUGAAAAGGGAUGTT | 1505 |
| 1120 | GCACAACAUGAAAAGGGAUGAAG | 1280 | | IL4R: 1122U21 sense siNA | ACAACAUGAAAAGGGAUGATT | 1506 |
| 1132 | AAGGGAUGAAGAUCCUCACAAGG | 1281 | | IL4R: 1134U21 sense siNA | GGGAUGAAGAUCCUCACAATT | 1507 |
| 3130 | UUGGGAAAUCGAUGAGAAAUUGA | 1282 | | IL4R: 3132U21 sense siNA | GGGAAAUCGAUGAGAAAUUTT | 1508 |
| 3131 | UGGGAAAUCGAUGAGAAAUUGAA | 1283 | | IL4R: 3133U21 sense siNA | GGAAAUCGAUGAGAAAUUGTT | 1509 |
| 3169 | UCAUUGCCUAGAGGUGCUCAUUC | 1284 | | IL4R: 3171U21 sense siNA | AUUGCCUAGAGGUGCUCAUTT | 1510 |
| 469 | CUAUACACUGGACCUGUGGGCUG | 1277 | | IL4R: 489L21 antisense siNA | GCCCACAGGUCCAGUGUAUTT | 1511 |
| | | | | (471C) | | |
| 551 | CCAGGAAACCUGACAGUUCACAC | 1278 | | IL4R: 571L21 antisense siNA | GUGAACUGUCAGGUUUCCUTT | 1512 |
| | | | | (553C) | | |
| 1119 | AGCACAACAUGAAAAGGGAUGAA | 1279 | | IL4R: 1139L21 antisense siNA | CAUCCCUUUUCAUGUUGUGTT | 1513 |
| | | | | (1121C) | | |
| 1120 | GCACAACAUGAAAAGGGAUGAAG | 1280 | | IL4R: 1140L21 antisense siNA | UCAUCCCUUUUCAUGUUGUTT | 1514 |
| | | | | 1122C | | |
| 1132 | AAGGGAUGAAGAUCCUCACAAGG | 1281 | | IL4R: 1152L21 antisense siNA | UUGUGAGGAUCUUCAUCCCTT | 1515 |
| | | | | (1134C) | | |
| 3130 | UUGGGAAAUCGAUGAGAAAUUGA | 1282 | | IL4R: 3150L21 antisense siNA | AAUUUCUCAUCGAUUUCCCTT | 1516 |
| | | | | (3132C) | | |
| 3131 | UGGGAAAUCGAUGAGAAAUUGAA | 1283 | | IL4R: 3151L21 antisense siNA | CAAUUUCUCAUCGAUUUCCTT | 1517 |
| | | | | (3133C) | | |
| 3169 | UCAUUGCCUAGAGGUGCUCAUUC | 1284 | | IL4R: 3189L21 antisense siNA | AUGAGCACCUCUAGGCAAUTT | 1518 |
| | | | | (3171C) | | |
| 469 | CUAUACACUGGACCUGUGGGCUG | 1277 | | IL4R: 471U21 sense siNA stab04 | B AuAcAcuGGAccuGuGGGcTT B | 1519 |
| 551 | CCAGGAAACCUGACAGUUCACAC | 1278 | | IL4R: 553U21 sense siNA stab04 | B AGGAAAccuGAcAGuucAcTT B | 1520 |
| 1119 | AGCACAACAUGAAAAGGGAUGAA | 1279 | | IL4R: 1121U21 sense siNA stab04 | B cAcAAcAuGAAAAGGGAuGTT B | 1521 |
| 1120 | GCACAACAUGAAAAGGGAUGAAG | 1280 | | IL4R: 1122U21 sense siNA stab04 | B AcAAcAuGAAAAGGGAuGATT B | 1522 |
| 1132 | AAGGGAUGAAGAUCCUCACAAGG | 1281 | | IL4R: 1134U21 sense siNA stab04 | B GGGAuGAAGAuccucAcAATT B | 1523 |
| 3130 | UUGGGAAAUCGAUGAGAAAUUGA | 1282 | | IL4R: 3132U21 sense siNA stab04 | B GGGAAAucGAuGAGAAAuu1T B | 1524 |
| 3131 | UGGGAAAUCGAUGAGAAAUUGAA | 1283 | | IL4R: 3133U21 sense siNA stab04 | B GGAAAucGAuGAGAAAuuGTT B | 1525 |
| 3169 | UCAUUGCCUAGAGGUGCUCAUUC | 1284 | | IL4R: 3171U21 sense siNA stab04 | B AuuGccuAGAGGuGcucAuTT B | 1526 |
| 469 | CUAUACACUGGACCUGUGGGCUG | 1277 | | IL4R: 489L21 antisense siNA | GcccAcAGGuccAGuGuAuTsT | 1527 |
| | | | | (471C) stab05 | | |
| 551 | CCAGGAAACCUGACAGUUCACAC | 1278 | | IL4R: 571L21 antisense siNA | GuGAAcuGucAGGuuuccuTsT | 1528 |
| | | | | (553C) stab05 | | |
| 1119 | AGCACAACAUGAAAAGGGAUGAA | 1279 | | IL4R: 1 139L21 antisense siNA | cAucccuuuucAuGuuGuGTsT | 1529 |
| | | | | (1121C) stab05 | | |
| 1120 | GCACAACAUGAAAAGGGAUGAAG | 1280 | | IL4R: 1 140L21 antisense siNA | ucAucccuuuucAuGuuGulsT | 1530 |
| | | | | (1122C) stab05 | | |
| 1132 | AAGGGAUGAAGAUCCUCACAAGG | 1281 | | IL4R: 1 152L21 antisense siNA | uuGuGAGGAucuucAucccTsT | 1531 |
| | | | | (1134C) stab05 | | |
| 3130 | UUGGGAAAUCGAUGAGAAAUUGA | 1282 | | IL4R: 3150L21 antisense siNA | AAuuucucAucGAuuucccTsT | 1532 |
| | | | | (3132C) stab05 | | |
| 3131 | UGGGAAAUCGAUGAGAAAUUGAA | 1283 | | IL4R: 3151 L21 antisense siNA | cAAuuucucAucGAuuuccTsT | 1533 |
| | | | | (3133C) stab05 | | |
| 3169 | UCAUUGCCUAGAGGUGCUCAUUC | 1284 | | IL4R: 3189L21 antisense siNA | AuGAGcAccucuAGGcAAuTsT | 1534 |
| | | | | (3171C) stab05 | | |
| 469 | CUAUACACUGGACCUGUGGGCUG | 1277 | | IL4R: 471U21 sense siNA stab07 | B AuAcAcuGGAccuGuGGGcTT B | 1535 |
| 551 | CCAGGAAACCUGACAGUUCACAC | 1278 | | IL4R: 553U21 sense siNA stab07 | B AGGAAAccuGAcAGuucAcTT B | 1536 |
| 1119 | AGCACAACAUGAAAAGGGAUGAA | 1279 | | IL4R: 1121U21 sense siNA stab07 | B cAcAAcAuGAAAAGGGAuGTT B | 1537 |
| 1120 | GCACAACAUGAAAAGGGAUGAAG | 1280 | | IL4R: 1122U21 sense siNA stab07 | B AcAAcAuGAAAAGGGAuGATT B | 1538 |
| 1132 | AAGGGAUGAAGAUCCUCACAAGG | 1281 | | IL4R: 1134U21 sense siNA stab07 | B GGGAuGAAGAuccucAcAATT B | 1539 |
| 3130 | UUGGGAAAUCGAUGAGAAAUUGA | 1282 | | IL4R: 3132U21 sense siNA stab07 | B GGGAAAucGAuGAGAAAuuTT B | 1540 |
| 3131 | UGGGAAAUCGAUGAGAAAUUGAA | 1283 | | IL4R: 3133U21 sense siNA stab07 | B GGAAAucGAuGAGAAAuuGTT B | 1541 |
| 3169 | UCAUUGCCUAGAGGUGCUCAUUC | 1284 | | IL4R: 3171U21 sense siNA stab07 | B AuuGccuAGAGGuGcucAuTT B | 1542 |
| 469 | CUAUACACUGGACCUGUGGGCUG | 1277 | | IL4R: 489L21 antisense siNA | GcccAcAGGuccAGuGuAuTsT | 1543 |
| | | | | (471C) stab11 | | |
| 551 | CCAGGAAACCUGACAGUUCACAC | 1278 | | IL4R: 571L21 antisense siNA | GuGAAcuGucAGGuuuccuTsT | 1544 |
| | | | | (553C) stab11 | | |
| 1119 | AGCACAACAUGAAAAGGGAUGAA | 1279 | | IL4R: 1139L21 antisense siNA | cAucccuuuucAuGuuGuGTsT | 1545 |
| | | | | (1121C) stab11 | | |
| 1120 | GCACAACAUGAAAAGGGAUGAAG | 1280 | | IL4R: 1140L21 antisense siNA | ucAucccuuuucAuGuuGuTsT | 1546 |
| | | | | (1122C) stab11 | | |
| 1132 | AAGGGAUGAAGAUCCUCACAAGG | 1281 | | IL4R: 1152L21 antisense siNA | uuGuGAGGAucuucAucccTsT | 1547 |
| | | | | (1134C) stab11 | | |
| 3130 | UUGGGAAAUCGAUGAGAAAUUGA | 1282 | | IL4R: 3150L21 antisense siNA | AAuuucucAucGAuuucccTsT | 1548 |
| | | | | (3132C) stab11 | | |
| 3131 | UGGGAAAUCGAUGAGAAAUUGAA | 1283 | | IL4R: 3151L21 antisense siNA | cAAuuucucAucGAuuuccTsT | 1549 |
| | | | | (3133C) stab11 | | |
| 3169 | UCAUUGCCUAGAGGUGCUCAUUC | 1284 | | IL4R: 3189L21 antisense siNA | AuGAGcAccucuAGGcAAuTsT | 1550 |
| | | | | (3171C) stab11 | | |
| 469 | CUAUACACUGGACCUGUGGGCUG | 1277 | | IL4R: 471U21 sense siNA stab18 | B AuAcAcuGGAccuGuGGGcTT B | 1551 |
| 551 | CCAGGAAACCUGACAGUUCACAC | 1278 | | IL4R: 553U21 sense siNA stab18 | B AGGAAAccuGAcAGuucAcTT B | 1552 |
| 1119 | AGCACAACAUGAAAAGGGAUGAA | 1279 | | IL4R: 1121U21 sense siNA stab18 | B cAcAAcAuGAAAAGGGAuGTT B | 1553 |
| 1120 | GCACAACAUGAAAAGGGAUGAAG | 1280 | | IL4R: 1122U21 sense siNA stab18 | B AcAAcAuGAAAAGGGAuGATT B | 1554 |
| 1132 | AAGGGAUGAAGAUCCUCACAAGG | 1281 | | IL4R: 1134U21 sense siNA stab18 | B GGGAuGAAGAuccucAcAATT B | 1555 |
| 3130 | UUGGGAAAUCGAUGAGAAAUUGA | 1282 | | IL4R: 3132U21 sense siNA stab18 | B GGGAAAucGAuGAGAAAuuTT B | 1556 |
| 3131 | UGGGAAAUCGAUGAGAAAUUGAA | 1283 | | IL4R: 3133U21 sense siNA stab18 | B GGAAAucGAuGAGAAAuuGTT B | 1557 |
| 3169 | UCAUUGCCUAGAGGUGCUCAUUC | 1284 | | IL4R: 3171U21 sense siNA stab18 | B AuuGccuAGAGGuGcucAuTT B | 1558 |
| 469 | CUAUACACUGGACCUGUGGGCUG | 1277 | | IL4R: 489L21 antisense siNA | GcccAcAGGuccAGuGuAuTsT | 1559 |
| | | | | (471C) stab08 | | |
| 551 | CCAGGAAACCUGACAGUUCACAC | 1278 | | IL4R: 571L21 antisense siNA | GuGAAcuGucAGGuuuccuTsT | 1560 |
| | | | | (553C) stabOB | | |
| 1119 | AGCACAACAUGAAAAGGGAUGAA | 1279 | | IL4R: 1139L21 antisense siNA | cAucccuuuucAuGuuGuGTsT | 1561 |
| | | | | (1121C) stab08 | | |
| 1120 | GCACAACAUGAAAAGGGAUGAAG | 1280 | | IL4R: 1140L21 antisense siNA | ucAucccuuuucAuGuuGuTsT | 1562 |
| | | | | (1122C) stab08 | | |
| 1132 | AAGGGAUGAAGAUCCUCACAAGG | 1281 | | IL4R: 1152L21 antisense siNA | uuGuGAGGAucuucAucccTsT | 1563 |
| | | | | (1134C) stab08 | | |
| 3130 | UUGGGAAAUCGAUGAGAAAUUGA | 1282 | | IL4R: 3150L21 antisense siNA | AAuuucucAucGAuuucccTsT | 1564 |
| | | | | (3132C) stabC8 | | |
| 3131 | UGGGAAAUCGAUGAGAAAUUGAA | 1283 | | IL4R: 3151L21 antisense siNA | cAAuuucucAucGAuuuccTsT | 1565 |
| | | | | (3133C) stab08 | | |
| 3169 | UCAUUGCCUAGAGGUGCUCAUUC | 1284 | | IL4R: 3189L21 antisense siNA | AuGAGcAccucuAGGcAAuTsT | 1566 |
| | | | | (3171C) stab08 | | |
| 469 | CUAUACACUGGACCUGUGGGCUG | 1277 | 36729 | IL4R: 471U21 sense siNA stab09 | B AUACACUGGACCUGUGGGCTT B | 1567 |
| 551 | CCAGGAAACCUGACAGUUCACAC | 1278 | 36730 | IL4R: 553U21 sense siNA stab09 | B AGGAAACCUGACAGUUCACTT B | 1568 |
| 1119 | AGCACAACAUGAAAAGGGAUGAA | 1279 | 36731 | IL4R: 1121U21 sense siNA stab09 | B CACAACAUGAAAAGGGAUGTT B | 1569 |
| 1120 | GCACAACAUGAAAAGGGAUGAAG | 1280 | 36732 | IL4R: 1122U21 sense siNA stab09 | B ACAACAUGAAAAGGGAUGATT B | 1570 |
| 1132 | AAGGGAUGAAGAUCCUCACAAGG | 1281 | 36733 | IL4R: 1134U21 sense siNA stab09 | B GGGAUGAAGAUCCUCACAATT B | 1571 |
| 3130 | UUGGGAAAUCGAUGAGAAAUUGA | 1282 | 36734 | IL4R: 3132U21 sense siNA stab09 | B GGGAAAUCGAUGAGAAAUUTT B | 1572 |
| 3131 | UGGGAAAUCGAUGAGAAAUUGAA | 1283 | 36735 | IL4R: 3133U21 sense siNA stab09 | B GGAAAUCGAUGAGAAAUUGTT B | 1573 |
| 3169 | UCAUUGCCUAGAGGUGCUCAUUC | 1284 | 36736 | IL4R: 3171U21 sense siNA stab09 | B AUUGCCUAGAGGUGCUCAUTT B | 1574 |
| 469 | CUAUACACUGGACCUGUGGGCUG | 1277 | | IL4R: 489L21 antisense siNA | GCCCACAGGUCCAGUGUAUTsT | 1575 |
| | | | | (471C) stab10 | | |
| 551 | CCAGGAAACCUGACAGUUCACAC | 1278 | | IL4R: 571L21 antisense siNA | GUGAACUGUCAGGUUUCCUTsT | 1576 |
| | | | | (553C) stab10 | | |
| 1119 | AGCACAACAUGAAAAGGGAUGAA | 1279 | | IL4R: 1139L21 antisense siNA | CAUCCCUUUUCAUGUUGUGTsT | 1577 |
| | | | | (1121C) stab10 | | |
| 1120 | GCACAACAUGAAAAGGGAUGAAG | 1280 | | IL4R: 1140L21 antisense siNA | UCAUCCCUUUUCAUGUUGUTsT | 1578 |
| | | | | (1122C) stab10 | | |
| 1132 | AAGGGAUGAAGAUCCUCACAAGG | 1281 | | IL4R: 1152L21 antisense siNA | UUGUGAGGAUCUUCAUCCCTsT | 1579 |
| | | | | (1134C) stab10 | | |
| 3130 | UUGGGAAAUCGAUGAGAAAUUGA | 1282 | | IL4R: 3150L21 antisense siNA | AAUUUCUCAUCGAUUUCCCTsT | 1580 |
| | | | | (3132C) stab10 | | |
| 3131 | UGGGAAAUCGAUGAGAAAUUGAA | 1283 | | IL4R: 3151L21 antisense siNA | CAAUUUCUCAUCGAUUUCCTsT | 1581 |
| | | | | (3133C) stab10 | | |
| 3169 | UCAUUGCCUAGAGGUGCUCAUUC | 1284 | | IL4R: 3189L21 antisense siNA | AUGAGCACCUCUAGGCAAUTsT | 1582 |
| | | | | (3171C) stab10 | | |
| 469 | CUAUACACUGGACCUGUGGGCUG | 1277 | 36737 | IL4R: 489L21 antisense siNA | GcccAcAGGuccAGuGuAuTT B | 1583 |
| | | | | (471C) stab19 | | |
| 551 | CCAGGAAACCUGACAGUUCACAC | 1278 | 36738 | IL4R: 571L21 antisense siNA | GuGAAcuGucAGGuuuccuTT B | 1584 |
| | | | | (553C) stab19 | | |
| 1119 | AGCACAACAUGAAAAGGGAUGAA | 1279 | 36739 | IL4R: 1139L21 antisense siNA | cAucccuuuucAuGuuGuGTT B | 1585 |
| | | | | (1121C) stab19 | | |
| 1120 | GCACAACAUGAAAAGGGAUGAAG | 1280 | 36740 | IL4R: 1140L21 antisense siNA | ucAucccuuuucAuGuuGuTT B | 1586 |
| | | | | (1122C) stab19 | | |
| 1132 | AAGGGAUGAAGAUCCUCACAAGG | 1281 | 36741 | IL4R: 1152L21 antisense siNA | uuGuGAGGAucuucAucccTT B | 1587 |
| | | | | (1134C) stab19 | | |
| 3130 | UUGGGAAAUCGAUGAGAAAUUGA | 1282 | 36742 | IL4R: 3150L21 antisense siNA | AAuuucucAucGAuuucccTT B | 1588 |
| | | | | (3132C) stab19 | | |
| 3131 | UGGGAAAUCGAUGAGAAAUUGAA | 1283 | 36743 | IL4R: 3151L21 antisense siNA | cAAuuucucAucGAuuuccTT B | 1589 |
| | | | | (3133C) stab19 | | |
| 3169 | UCAUUGCCUAGAGGUGCUCAUUC | 1284 | 36744 | IL4R: 3189L21 antisense siNA | AuGAGcAccucuAGGcAAuTT B | 1590 |
| | | | | (3171C) stab19 | | |
| 469 | CUAUACACUGGACCUGUGGGCUG | 1277 | 36745 | IL4R: 489L21 antisense siNA | GCCCACAGGUCCAGUGUAUTT B | 1591 |
| | | | | (471C) stab22 | | |
| 551 | CCAGGAAACCUGACAGUUCACAC | 1278 | 36746 | IL4R: 571L21 antisense siNA | GUGAACUGUCAGGUUUCCUTT B | 1592 |
| | | | | (553C) stab22 | | |
| 1119 | AGCACAACAUGAAAAGGGAUGAA | 1279 | 36747 | IL4R: 1139L21 antisense siNA | CAUCCCUUUUCAUGUUGUGTT B | 1593 |
| | | | | (1121C) stab22 | | |
| 1120 | GCACAACAUGAAAAGGGAUGAAG | 1280 | 36748 | IL4R: 1140L21 antisense siNA | UCAUCCCUUUUCAUGUUGUTT B | 1594 |
| | | | | (1122C) stab22 | | |
| 1132 | AAGGGAUGAAGAUCCUCACAAGG | 1281 | 36749 | IL4R: 1152L21 antisense siNA | UUGUGAGGAUCUUCAUCCCTT B | 1595 |
| | | | | (1134C) stab22 | | |
| 3130 | UUGGGAAAUCGAUGAGAAAUUGA | 1282 | 36750 | IL4R: 3150L21 antisense siNA | AAUUUCUCAUCGAUUUCCCTT B | 1596 |
| | | | | (3132C) stab22 | | |
| 3131 | UGGGAAAUCGAUGAGAAAUUGAA | 1283 | 36751 | IL4R: 3151L21 antisense siNA | CAAUUUCUCAUCGAUUUCCTT B | 1597 |
| | | | | (3133C) stab22 | | |
| 3169 | UCAUUGCCUAGAGGUGCUCAUUC | 1284 | 36752 | IL4R: 3189L21 antisense siNA | AUGAGCACCUCUAGGCAAUTT B | 1598 |
| | | | | (3171C) stab22 | | |
| IL13 | | | | | | |
| 391 | CCCAGUUUGUAAAGGACCUGCUC | 1285 | | IL13: 393U21 sense siNA | CAGUUUGUAAAGGACCUGCTT | 1599 |
| 797 | CACUUCACACACAGGCAACUGAG | 1286 | | IL13: 799U21 sense siNA | CUUCACACACAGGCAACUGTT | 1600 |
| 832 | UCAGGCACACUUCUUCUUGGUCU | 1287 | | IL13: 834U21 sense siNA | AGGCACACUUCUUCUUGGUTT | 1601 |
| 911 | AAGACUGUGGCUGCUAGCACUUG | 1288 | | IL13: 913U21 sense siNA | GACUGUGGCUGCUAGCACUTT | 1602 |
| 963 | AGCACUAAAGCAGUGGACACCAG | 1289 | | IL13: 965U21 sense siNA | CACUAAAGCAGUGGACACCTT | 1603 |
| 965 | CACUAAAGCAGUGGACACCAGGA | 1290 | | IL13: 967U21 sense siNA | CUAAAGCAGUGGACACCAGTT | 1604 |
| 968 | UAAAGCAGUGGACACCAGGAGUC | 1291 | | IL13: 970U21 sense siNA | AAGCAGUGGACACCAGGAGTT | 1605 |
| 1191 | AGAAGGGUACCUUGAACACUGGG | 1292 | | IL13: 1193U21 sense siNA | AAGGGUACCUUGAACACUGTT | 1606 |
| 3910 | CCAGUUUGUAAAGGACCUGCUC | 1285 | | IL13: 411L21 antisense siNA | GCAGGUCCUUUACAAACUGTT | 1607 |
| | | | | (393C) | | |
| 797 | CACUUCACACACAGGCAACUGAG | 1286 | | IL13: 817L21 antisense siNA | CAGUUGCCUGUGUGUGAAGTT | 1608 |
| | | | | (799C) | | |
| 832 | UCAGGCACACUUCUUCUUGGUCU | 1287 | | IL13: 852L21 antisense siNA | ACCAAGAAGAAGUGUGCCUTT | 1609 |
| | | | | (834C) | | |
| 911 | AAGACUGUGGCUGCUAGCACUUG | 1288 | | IL13: 931L21 antisense siNA | AGUGCUAGCAGCCACAGUCTT | 1610 |
| | | | | (913C) | | |
| 963 | AGCACUAAAGCAGUGGACACCAG | 1289 | | IL13: 983L21 antisense siNA | GGUGUCCACUGCUUUAGUGTT | 1611 |
| | | | | (965C) | | |
| 965 | CACUAAAGCAGUGGACACCAGGA | 1290 | | IL13: 985L21 antisense siNA | CUGGUGUCCACUGCUUUAGTT | 1612 |
| | | | | (967C) | | |
| 968 | UAAAGCAGUGGACACCAGGAGUC | 1291 | | IL13: 988L21 antisense siNA | CUCCUGGUGUCCACUGCUUTT | 1613 |
| | | | | (970C) | | |
| 1191 | AGAAGGGUACCUUGAACACUGGG | 1292 | | IL13: 1211L21 antisense siNA | CAGUGUUCAAGGUACCCUUTT | 1614 |
| | | | | (1193C) | | |
| 391 | CCCAGUUUGUAAAGGACCUGCUC | 1285 | | IL13: 393U21 sense siNA stab04 | B cAGuuuGuAAAGGAccuGcTT B | 1615 |
| 797 | CACUUCACACACAGGCAACUGAG | 1286 | | IL13: 799U21 sense siNA stab04 | B cuucAcAcAcAGGcAAcuGTT B | 1616 |
| 832 | UCAGGCACACUUCUUCUUGGUCU | 1287 | | IL13: 834U21 sense siNA stab04 | B AGGcAcAcuucuucuuGGuTT B | 1617 |
| 911 | AAGACUGUGGCUGCUAGCACUUG | 1288 | | IL13: 913U21 sense siNA stab04 | B GAcuGuGGcuGcuAGcAcuTT B | 1618 |
| 963 | AGCACUAAAGCAGUGGACACCAG | 1289 | | IL13: 965U21 sense siNA stab04 | B cAcuAAAGcAGuGGAcAccTT B | 1619 |
| 965 | CACUAAAGCAGUGGACACCAGGA | 1290 | | IL13: 967U21 sense siNA stab04 | B cuAAAGcAGuGGAcAccAGTT B | 1620 |
| 968 | UAAAGCAGUGGACACCAGGAGUC | 1291 | | IL13: 970U21 sense siNA stab04 | B AAGcAGuGGAcAccAGGAGTT B | 1621 |
| 1191 | AGAAGGGUACCUUGAACACUGGG | 1292 | | IL13: 1193U21 sense siNA stab04 | B AAGGGuAccuuGAAcAcuGTT B | 1622 |
| 391 | CCCAGUUUGUAAAGGACCUGCUC | 1285 | | IL13: 411L21 antisense siNA | GcAGGuccuuuAcAAAcuGTsT | 1623 |
| | | | | (393C) stab05 | | |
| 797 | CACUUCACACACAGGCAACUGAG | 1286 | | IL13: 817L21 antisense siNA | cAGuuGccuGuGuGuGAAGTsT | 1624 |
| | | | | (799C) stab05 | | |
| 832 | UCAGGCACACUUCUUCUUGGUCU | 1287 | | IL13: 852L21 antisense siNA | AccAAGAAGAAGuGuGccuTsT | 1625 |
| | | | | (834C) stab05 | | |
| 911 | AAGACUGUGGCUGCUAGCACUUG | 1288 | | IL13: 931L21 antisense siNA | AGuGcuAGcAGccAcAGucTsT | 1626 |
| | | | | (913C) stab05 | | |
| 963 | AGCACUAAAGCAGUGGACACCAG | 1289 | | IL13: 983L21 antisense siNA | GGuGuccAcuGcuuuAGuGTsT | 1627 |
| | | | | (965C) stab05 | | |
| 965 | CACUAAAGCAGUGGACACCAGGA | 1290 | | IL13: 985L21 antisense siNA | cuGGuGuccAcuGcuuuAGTsT | 1628 |
| | | | | (967C) stab05 | | |
| 968 | UAAAGCAGUGGACACCAGGAGUC | 1291 | | IL13: 988L21 antisense siNA | cuccuGGuGuccAcuGcuuTsT | 1629 |
| | | | | (970C) stab05 | | |
| 1191 | AGAAGGGUACCUUGAACACUGGG | 1292 | | IL13: 1211L21 antisense siNA | cAGuGuucAAGGuAcccuuTsT | 1630 |
| | | | | (1193C) stab05 | | |
| 864 | UAUUGUGUGUUAUUUAAAUGAGU | 1293 | 33355 | IL13: 864U21 sense siNA stab07 | B uuGuGuGuuAuuuAAAuGATT B | 1631 |
| 865 | AUUGUGUGUUAUUUAAAUGAGUG | 1294 | 33356 | IL13: 865U21 sense siNA stab07 | B uGuGuGuuAuuuAAAuGAGTT B | 1632 |
| 866 | UUGUGUGUUAUUUAAAUGAGUGU | 1295 | 33357 | IL13: 866U21 sense siNA stab07 | B GuGuGuuAuuuAAAuGAGuTT B | 1633 |
| 863 | UUAUUGUGUGUUAUUUAAAUGAG | 1296 | 33358 | IL13: 863U21 sense siNA stab07 | B AuuGuGuGuuAuuuAAAuGTT B | 1634 |
| 200 | UGCAAUGGCAGCAUGGUAUGGAG | 1297 | 33359 | IL13: 200U21 sense siNA stab07 | B cAAuGGcAGcAuGGuAuGGTT B | 1635 |
| 201 | GCAAUGGCAGCAUGGUAUGGAGC | 1298 | 33360 | IL13: 201U21 sense siNA stab07 | B AAuGGcAGcAuGGuAuGGATT B | 1636 |
| 202 | CAAUGGCAGCAUGGUAUGGAGCA | 1299 | 33361 | IL13: 202U21 sense siNA stab07 | B AuGGcAGcAuGGuAuGGAGTT B | 1637 |
| 860 | UUAUUAUUGUGUGUUAUUUAAAU | 1300 | 33362 | IL13: 860U21 sense siNA stab07 | B AuuAuuGuGuGuuAuuuAATT B | 1638 |
| 861 | UAUUAUUGUGUGUUAUUUAAAUG | 1301 | 33363 | IL13: 861U21 sense siNA stab07 | B uuAuuGuGuGuuAuuuAAATT B | 1639 |
| 862 | AUUAUUGUGUGUUAUUUAAAUGA | 1302 | 33364 | IL13: 862U21 sense siNA stab07 | B uAuuGuGuGuuAuuuAAAuTT B | 1640 |
| 391 | CCCAGUUUGUAAAGGACCUGCUC | 1285 | | IL13: 393U21 sense siNA stab07 | B cAGuuuGuAAAGGAccuGcTT B | 1641 |
| 797 | CACUUCACACACAGGCAACUGAG | 1286 | | IL13: 799U21 sense siNA stab07 | B cuucAcAcAcAGGcAAcuGTT B | 1642 |
| 832 | UCAGGCACACUUCUUCUUGGUCU | 1287 | | IL13: 834U21 sense siNA stab07 | B AGGcAcAcuucuucuuGGuTT B | 1643 |
| 911 | AAGACUGUGGCUGCUAGCACUUG | 1288 | | IL13: 913U21 sense siNA stab07 | B GAcuGuGGcuGcuAGcAcuTT B | 1644 |
| 963 | AGCACUAAAGCAGUGGACACCAG | 1289 | | IL13: 965U21 sense siNA stab07 | B cAcuAAAGcAGuGGAcAccTT B | 1645 |
| 965 | CACUAAAGCAGUGGACACCAGGA | 1290 | | IL13: 967U21 sense siNA stab07 | B cuAAAGcAGuGGAcAccAGTT B | 1646 |
| 968 | UAAAGCAGUGGACACCAGGAGUC | 1291 | | IL13: 970U21 sense siNA stab07 | B AAGcAGuGGAcAccAGGAGTT B | 1647 |
| 1191 | AGAAGGGUACCUUGAACACUGGG | 1292 | | IL13: 1193U21 sense siNA stab07 | B AAGGGuAccuuGAAcAcuGTT B | 1648 |
| 391 | CCCAGUUUGUAAAGGACCUGCUC | 1285 | | IL13: 411L21 antisense siNA | GcAGGuccuuuAcAAAcuGTsT | 1649 |
| | | | | (393C) stab11 | | |
| 797 | CACUUCACACACAGGCAACUGAG | 1286 | | IL13: 817L21 antisense siNA | cAGuuGccuGuGuGuGAAGTsT | 1650 |
| | | | | (799C) stab11 | | |
| 832 | UCAGGCACACUUCUUCUUGGUCU | 1287 | | IL13: 852L21 antisense siNA | AccAAGAAGAAGuGuGccuTsT | 1651 |
| | | | | (834C) stab11 | | |
| 911 | AAGACUGUGGCUGCUAGCACUUG | 1288 | | IL13: 931L21 antisense siNA | AGuGcuAGcAGccAcAGucTsT | 1652 |
| | | | | (913C) stab11 | | |
| 963 | AGCACUAAAGCAGUGGACACCAG | 1289 | | IL13: 983L21 antisense siNA | GGuGuccAcuGcuuuAGuGTsT | 1653 |
| | | | | (965C) stab11 | | |
| 965 | CACUAAAGCAGUGGACACCAGGA | 1290 | | IL13: 985L21 antisense siNA | cuGGuGuccAcuGcuuuAGTsT | 1654 |
| | | | | (967C) stab11 | | |
| 968 | UAAAGCAGUGGACACCAGGAGUC | 1291 | | IL13: 988L21 antisense siNA | cuccuGGuGuccAcuGcuuTsT | 1655 |
| | | | | (970C) stab11 | | |
| 1191 | AGAAGGGUACCUUGAACACUGGG | 1292 | | IL13: 1211L21 antisense siNA | cAGuGuucAAGGuAcccuuTsT | 1656 |
| | | | | (1193C) stab11 | | |
| 391 | CCCAGUUUGUAAAGGACCUGCUC | 1285 | | IL13: 393U21 sense siNA stab18 | B cAGuuuGuAAAGGAccuGcTT B | 1657 |
| 797 | CACUUCACACACAGGCAACUGAG | 1286 | | IL13: 799U21 sense siNA stab18 | B cuucAcAcAcAGGcAAcuGTT B | 1658 |
| 832 | UCAGGCACACUUCUUCUUGGUCU | 1287 | | IL13: 834U21 sense siNA stab18 | B AGGcAcAcuucuucuuGGuTT B | 1659 |
| 911 | AAGACUGUGGCUGCUAGCACUUG | 1288 | | IL13: 913U21 sense siNA stab18 | B GAcuGuGGcuGcuAGcAcuTT B | 1660 |
| 963 | AGCACUAAAGCAGUGGACACCAG | 1289 | | IL13: 965U21 sense siNA stab18 | B cAcuAAAGcAGuGGAcAccTT B | 1661 |
| 965 | CACUAAAGCAGUGGACACCAGGA | 1290 | | IL13: 967U21 sense siNA stab18 | B cuAAAGcAGuGGAcAccAGTT B | 1662 |
| 968 | UAAAGCAGUGGACACCAGGAGUC | 1291 | | IL13: 970U21 sense siNA stab18 | B AAGcAGuGGAcAccAGGAGTT B | 1663 |
| 1191 | AGAAGGGUACCUUGAACACUGGG | 1292 | | IL13: 1193U21 sense siNA stab18 | B AAGGGuAccuuGAAcAcuGTT B | 1664 |
| 864 | UAUUGUGUGUUAUUUAAAUGAGU | 1293 | 33375 | IL13: 882L21 antisense siNA | ucAuuuAAAuAAcAcAcAATsT | 1665 |
| | | | | (864C) stab08 | | |
| 865 | AUUGUGUGUUAUUUAAAUGAGUG | 1294 | 33376 | IL13: 883L21 antisense siNA | cucAuuuAAAuAAcAcAcATsT | 1666 |
| | | | | (865C) stab08 | | |
| 866 | UUGUGUGUUAUUUAAAUGAGUGU | 1295 | 33377 | IL13: 884L21 antisense siNA | AcucAuuuAAAuAAcAcAcTsT | 1667 |
| | | | | (866C) stab08 | | |
| 863 | UUAUUGUGUGUUAUUUAAAUGAG | 1296 | 33378 | IL13: 881L21 antisense siNA | cAuuuAAAuAAcAcAcAAuTsT | 1668 |
| | | | | (863C) stab08 | | |
| 200 | UGCAAUGGCAGCAUGGUAUGGAG | 1297 | 33379 | IL13: 218L21 antisense siNA | ccAuAccAuGcuGccAuuGTsT | 1669 |
| | | | | (200C) stab08 | | |
| 201 | GCAAUGGCAGCAUGGUAUGGAGC | 1298 | 33380 | IL13: 219L21 antisense siNA | uccAuAccAuGcuGccAuuTsT | 1670 |
| | | | | (201C) stab08 | | |
| 202 | CAAUGGCAGCAUGGUAUGGAGCA | 1299 | 33381 | IL13: 220L21 antisense siNA | cuccAuAccAuGcuGccAuTsT | 1671 |
| | | | | (202C) stab08 | | |
| 860 | UUAUUAUUGUGUGUUAUUUAAAU | 1300 | 33382 | IL13: 878L21 antisense siNA | uuAAAuAAcAcAcAAuAAuTsT | 1672 |
| | | | | (860C) stab08 | | |
| 861 | UAUUAUUGUGUGUUAUUUAAAUG | 1301 | 33383 | IL13: 879L21 antisense siNA | uuuAAAuAAcAcAcAAuAATsT | 1673 |
| | | | | (861C) stab08 | | |
| 862 | AUUAUUGUGUGUUAUUUAAAUGA | 1302 | 33384 | IL13: 880L21 antisense siNA | AuuuAAAuAAcAcAcAAuATsT | 1674 |
| | | | | (862C) stab08 | | |
| 391 | CCCAGUUUGUAAAGGACCUGCUC | 1285 | | IL13: 411L21 antisense siNA | GcAGGuccuuuAcAAAcuGTsT | 1675 |
| | | | | (393C) stab08 | | |
| 797 | CACUUCACACACAGGCAACUGAG | 1286 | | IL13: 817L21 antisense siNA | cAGuuGccuGuGuGuGAAGTsT | 1676 |
| | | | | (799C) stab08 | | |
| 832 | UCAGGCACACUUCUUCUUGGUCU | 1287 | | IL13: 852L21 antisense siNA | AccAAGAAGAAGuGuGccuTsT | 1677 |
| | | | | (834C) stab08 | | |
| 911 | AAGACUGUGGCUGCUAGCACUUG | 1288 | | IL13: 931L21 antisense siNA | AGuGcuAGcAGccAcAGucTsT | 1678 |
| | | | | (913C) stab08 | | |
| 963 | AGCACUAAAGCAGUGGACACCAG | 1289 | | IL13: 983L21 antisense siNA | GGuGuccAcuGcuuuAGuGTsT | 1679 |
| | | | | (965C) stab08 | | |
| 965 | CACUAAAGCAGUGGACACCAGGA | 1290 | | IL13: 985L21 antisense siNA | cuGGuGuccAcuGcuuuAGTsT | 1680 |
| | | | | (967C) stab08 | | |
| 968 | UAAAGCAGUGGACACCAGGAGUC | 1291 | | IL13: 988L21 antisense siNA | cuccuGGuGuccAcuGcuuTsT | 1681 |
| | | | | (970C) stab08 | | |
| 1191 | AGAAGGGUACCUUGAACACUGGG | 1292 | | IL13: 1211L21 antisense siNA | cAGuGuucAAGGuAcccuuTsT | 1682 |
| | | | | (1193C) stab08 | | |
| 391 | CCCAGUUUGUAAAGGACCUGCUC | 1285 | 36890 | IL13: 393U21 sense siNA stab09 | B CAGUUUGUAAAGGACCUGCTT B | 1683 |
| 797 | CACUUCACACACAGGCAACUGAG | 1286 | 36891 | IL13: 799U21 sense siNA stab09 | B CUUCACACACAGGCAACUGTT B | 1684 |
| 832 | UCAGGCACACUUCUUCUUGGUCU | 1287 | 36892 | IL13: 834U21 sense siNA stab09 | B AGGCACACUUCUUCUUGGUTT B | 1685 |
| 911 | AAGACUGUGGCUGCUAGCACUUG | 1288 | 36893 | IL13: 913U21 sense siNA stab09 | B GACUGUGGCUGCUAGCACUTT B | 1686 |
| 963 | AGCACUAAAGCAGUGGACACCAG | 1289 | 36894 | IL13: 965U21 sense siNA stab09 | B CACUAAAGCAGUGGACACCTT B | 1687 |
| 965 | CACUAAAGCAGUGGACACCAGGA | 1290 | 36895 | IL13: 967U21 sense siNA stab09 | B CUAAAGCAGUGGACACCAGTT B | 1688 |
| 968 | UAAAGCAGUGGACACCAGGAGUC | 1291 | 36896 | IL13: 970U21 sense siNA stab09 | B AAGCAGUGGACACCAGGAGTT B | 1689 |
| 1191 | AGAAGGGUACCUUGAACACUGGG | 1292 | 36897 | IL13: 1193U21 sense siNA stab09 | B AAGGGUACCUUGAACACUGTT B | 1690 |
| 391 | CCCAGUUUGUAAAGGACCUGCUC | 1285 | | IL13: 411L21 antisense siNA | GCAGGUCCUUUACAAACUGTsT | 1691 |
| | | | | (393C) stab10 | | |
| 797 | CACUUCACACACAGGCAACUGAG | 1286 | | IL13: 817L21 antisense siNA | CAGUUGCCUGUGUGUGAAGTsT | 1692 |
| | | | | (799C) stab10 | | |
| 832 | UCAGGCACACUUCUUCUUGGUCU | 1287 | | IL13: 852L21 antisense siNA | ACCAAGAAGAAGUGUGCCUTsT | 1693 |
| | | | | (834C) stab10 | | |
| 911 | AAGACUGUGGCUGCUAGCACUUG | 1288 | | IL13: 931L21 antisense siNA | AGUGCUAGCAGCCACAGUCTsT | 1694 |
| | | | | (913C) stab10 | | |
| 963 | AGCACUAAAGCAGUGGACACCAG | 1289 | | IL13: 983L21 antisense siNA | GGUGUCCACUGCUUUAGUGTsT | 1695 |
| | | | | (965C) stab10 | | |
| 965 | CACUAAAGCAGUGGACACCAGGA | 1290 | | IL13: 985L21 antisense siNA | CUGGUGUCCACUGCUUUAGTsT | 1696 |
| | | | | (967C) stab10 | | |
| 968 | UAAAGCAGUGGACACCAGGAGUC | 1291 | | IL13: 988L21 antisense siNA | CUCCUGGUGUCCACUGCUUTsT | 1697 |
| | | | | (970C) stab10 | | |
| 1191 | AGAAGGGUACCUUGAACACUGGG | 1292 | | IL13: 1211L21 antisense siNA | CAGUGUUCAAGGUACCCUUTsT | 1698 |
| | | | | (1193C) stab10 | | |
| 391 | CCCAGUUUGUAAAGGACCUGCUC | 1285 | | IL13: 411L21 antisense siNA | GcAGGuccuuuAcAAAcuGTT B | 1699 |
| | | | | (393C) stab19 | | |
| 797 | CACUUCACACACAGGCAACUGAG | 1286 | | IL13: 817L21 antisense siNA | cAGuuGccuGuGuGuGAAGTT B | 1700 |
| | | | | (799C) stab19 | | |
| 832 | UCAGGCACACUUCUUCUUGGUCU | 1287 | | IL13: 852L21 antisense siNA | AccAAGAAGAAGuGuGccuTT B | 1701 |
| | | | | (834C) stab19 | | |
| 911 | AAGACUGUGGCUGCUAGCACUUG | 1288 | | IL13: 931L21 antisense siNA | AGuGcuAGcAGccAcAGucTT B | 1702 |
| | | | | (913C) stab19 | | |
| 963 | AGCACUAAAGCAGUGGACACCAG | 1289 | | IL13: 983L21 antisense siNA | GGuGuccAcuGcuuuAGuGTT B | 1703 |
| | | | | (965C) stab19 | | |
| 965 | CACUAAAGCAGUGGACACCAGGA | 1290 | | IL13: 985L21 antisense siNA | cuGGuGuccAcuGcuuuAGTT B | 1704 |
| | | | | (967C) stab19 | | |
| 968 | UAAAGCAGUGGACACCAGGAGUC | 1291 | | IL13: 988L21 antisense siNA | cuccuGGuGuccAcuGcuuTT B | 1705 |
| | | | | (970C) stab19 | | |
| 1191 | AGAAGGGUACCUUGAACACUGGG | 1292 | | IL13: 1211L21 antisense siNA | cAGuGuucAAGGuAcccuuTT B | 1706 |
| | | | | (1193C) stab19 | | |
| 391 | CCCAGUUUGUAAAGGACCUGCUC | 1285 | 36898 | IL13: 411L21 antisense siNA | GCAGGUCCUUUACAAACUGTT B | 1707 |
| | | | | (393C) stab22 | | |
| 797 | CACUUCACACACAGGCAACUGAG | 1286 | 36899 | IL13: 817L21 antisense siNA | CAGUUGCCUGUGUGUGAAGTT B | 1708 |
| | | | | (799C) stab22 | | |
| 832 | UCAGGCACACUUCUUCUUGGUCU | 1287 | 36900 | IL13: 852L21 antisense siNA | ACCAAGAAGAAGUGUGCCUTT B | 1709 |
| | | | | (834C) stab22 | | |
| 911 | AAGACUGUGGCUGCUAGCACUUG | 1288 | 36901 | IL13: 931L21 antisense siNA | AGUGCUAGCAGCCACAGUCTT B | 1710 |
| | | | | (913C) stab22 | | |
| 963 | AGCACUAAAGCAGUGGACACCAG | 1289 | 36902 | IL13: 983L21 antisense siNA | GGUGUCCACUGCUUUAGUGTT B | 1711 |
| | | | | (965C) stab22 | | |
| 965 | CACUAAAGCAGUGGACACCAGGA | 1290 | 36903 | IL13: 985L21 antisense siNA | CUGGUGUCCACUGCUUUAGTT B | 1712 |
| | | | | (967C) stab22 | | |
| 968 | UAAAGCAGUGGACACCAGGAGUC | 1291 | 36904 | IL13: 988L21 antisense siNA | CUCCUGGUGUCCACUGCUUTT B | 1713 |
| | | | | (970C) stab22 | | |
| 1191 | AGAAGGGUACCUUGAACACUGGG | 1292 | 36905 | IL13: 1211L21 antisense siNA | CAGUGUUCAAGGUACCCUUTT B | 1714 |
| | | | | (1193C) stab22 | | |

IL13R

| | | | | | | |
|---|---|---|---|---|---|---|
| 408 | AAGGUGAUCCUGAGUCUGCUGUG | 1303 | | IL13RA1: 410U21 sense siNA | GGUGAUCCUGAGUCUGCUGTT | 1715 |
| 657 | UGGUCAAGGAUAAUGCAGGAAAA | 1304 | | IL13RA1: 659U21 sense siNA | GUCAAGGAUAAUGCAGGAATT | 1716 |
| 871 | CGUCCAAGAGGCUAAAUGUGAGA | 1305 | | IL13RA1: 873U21 sense siNA | UCCAAGAGGCUAAAUGUGATT | 1717 |
| 1276 | GGAAACCGACUCUGUAGUGCUGA | 1306 | | IL13RA1: 1278U21 sense siNA | AAACCGACUCUGUAGUGCUTT | 1718 |
| 1308 | UGAAGAAAGCCUCUCAGUGAUGG | 1307 | | IL13RA1: 1310U21 sense siNA | AAGAAAGCCUCUCAGUGAUTT | 1719 |
| 1424 | ACUGCACCAUUUAAAAACAGGCA | 1308 | | IL13RA1: 1426U21 sense siNA | UGCACCAUUUAAAAACAGGTT | 1720 |
| 2186 | CAGCAUUUUCCUCUGCUUUGAAA | 1309 | | IL13RA1: 2188U21 sense siNA | GCAUUUUCCUCUGCUUUGATT | 1721 |
| 2270 | CCAAGACCUUUCAAAGCCAUUUU | 1310 | | IL13RA1: 2272U21 sense siNA | AAGACCUUUCAAAGCCAUUTT | 1722 |
| 408 | AAGGUGAUCCUGAGUCUGCUGUG | 1303 | | IL13RA1: 428L21 antisense siNA | CAGCAGACUCAGGAUCACCTT | 1723 |
| | | | | (410C) | | |
| 657 | UGGUCAAGGAUAAUGCAGGAAAA | 1304 | | IL13RA1: 677L21 antisense siNA | UUCCUGCAUUAUCCUUGAGTT | 1724 |
| | | | | (659C) | | |
| 871 | CGUCCAAGAGGCUAAAUGUGAGA | 1305 | | IL13RA1: 891L21 antisense siNA | UCACAUUUAGCCUCUUGGATT | 1725 |
| | | | | (873C) | | |
| 1276 | GGAAACCGACUCUGUAGUGCUGA | 1306 | | IL13RA1: 1296L21 antisense siNA | AGCACUACAGAGUCGGUUUTT | 1726 |
| | | | | (1278C) | | |
| 1308 | UGAAGAAAGCCUCUCAGUGAUGG | 1307 | | IL13RA1: 1328L21 antisense siNA | AUCACUGAGAGGCUUUCUUTT | 1727 |
| | | | | (1310C) | | |
| 1424 | ACUGCACCAUUUAAAAACAGGCA | 1308 | | IL13RA1: 1444L21 antisense siNA | CCUGUUUUUAAAUGGUGCATT | 1728 |
| | | | | (1426C) | | |
| 2186 | CAGCAUUUUCCUCUGCUUUGAAA | 1309 | | IL13RA1: 2206L21 antisense siNA | UCAAAGCAGAGGAAAAUGCTT | 1729 |
| | | | | (2188C) | | |
| 2270 | CCAAGACCUUUCAAAGCCAUUUU | 1310 | | IL13RA1: 2290L21 antisense siNA | AAUGGCUUUGAAAGGUCUUTT | 1730 |
| | | | | (2272C) | | |
| 408 | AAGGUGAUCCUGAGUCUGCUGUG | 1303 | | IL13RA1: 410U21 sense siNA | B GGuGAuccuGAGucuGcuGTT B | 1731 |
| | | | | stab04 | | |
| 657 | UGGUCAAGGAUAAUGCAGGAAAA | 1304 | | IL13RA1: 659U21 sense siNA | B GucAAGGAuAAuGcAGGAATT B | 1732 |
| | | | | stab04 | | |
| 871 | CGUCCAAGAGGCUAAAUGUGAGA | 1305 | | IL13RA1: 873U21 sense siNA | B uccAAGAGGcuAAAuGuGATT B | 1733 |
| | | | | stab04 | | |
| 1276 | GGAAACCGACUCUGUAGUGCUGA | 1306 | | IL13RA1: 1278U21 sense siNA | B AAAccGAcucuGuAGuGcuTT B | 1734 |
| | | | | stab04 | | |
| 1308 | UGAAGAAAGCCUCUCAGUGAUGG | 1307 | | IL13RA1: 1310U21 sense siNA | B AAGAAAGccucucAGuGAuTT B | 1735 |
| | | | | stab04 | | |
| 1424 | ACUGCACCAUUUAAAAACAGGCA | 1308 | | IL13RA1: 1426U2l sense siNA | B uGcAccAuuuAAAAAcAGGTT B | 1736 |
| | | | | stab04 | | |
| 2186 | CAGCAUUUUCCUCUGCUUUGAAA | 1309 | | IL13RA1: 2188U21 sense siNA | B GcAuuuuccucuGcuuuGATT B | 1737 |
| | | | | stab04 | | |
| 2270 | CCAAGACCUUUCAAAGCCAUUUU | 1310 | | IL13RA1: 2272U21 sense siNA | B AAGAccuuucAAAGccAuuTT B | 1738 |
| | | | | stab04 | | |
| 408 | AAGGUGAUCCUGAGUCUGCUGUG | 1303 | | IL13RA1: 428L21 antisense siNA | cAGcAGAcucAGGAucAccTsT | 1739 |
| | | | | (410C) stab05 | | |
| 657 | UGGUCAAGGAUAAUGCAGGAAAA | 1304 | | IL13RA1: 677L21 antisense siNA | uuccuGcAuuAuccuuGAcTsT | 1740 |
| | | | | (659C) stab05 | | |
| 871 | CGUCCAAGAGGCUAAAUGUGAGA | 1305 | | IL13RA1: 891L21 antisense siNA | ucAcAuuuAGccucuuGGATsT | 1741 |
| | | | | (873C) stab05 | | |
| 1276 | GGAAACCGACUCUGUAGUGCUGA | 1306 | | IL13RA1:1296L21 antisense siNA | AGcAcuAcAGAGucGGuuuTsT | 1742 |
| | | | | (1278C) stab05 | | |
| 1308 | UGAAGAAAGCCUCUCAGUGAUGG | 1307 | | IL13RA1: 1328L21 antisense siNA | AucAcuGAGAGGcuuucuuTsT | 1743 |
| | | | | (1310C) stab05 | | |
| 1424 | ACUGCACCAUUUAAAAACAGGCA | 1308 | | IL13RA1: 1444L21 antisense siNA | ccuGuuuuuAAAuGGuGcATsT | 1744 |
| | | | | (1426C) stab05 | | |
| 2186 | CAGCAUUUUCCUCUGCUUUGAAA | 1309 | | IL13RA1: 2206L21 antisense siNA | ucAAAGcAGAGGAAAAuGcTsT | 1745 |
| | | | | (2188C) stab05 | | |
| 2270 | CCAAGACCUUUCAAAGCCAUUUU | 1310 | | IL13RA1: 2290L21 antisense siNA | AAuGGcuuuGAAAGGucuuTsT | 1746 |
| | | | | (2272C) stab05 | | |
| 408 | AAGGUGAUCCUGAGUCUGCUGUG | 1303 | | IL13RA1: 410U21 sense siNA | B GGuGAuccuGAGucuGcuGTT B | 1747 |
| | | | | stab07 | | |
| 657 | UGGUCAAGGAUAAUGCAGGAAAA | 1304 | | IL13RA1: 659U21 sense siNA | B GucAAGGAuAAuGcAGGAATT B | 1748 |
| | | | | stab07 | | |
| 871 | CGUCCAAGAGGCUAAAUGUGAGA | 1305 | | IL13RA1: 873U21 sense siNA | B uccAAGAGGcuAAAuGuGATT B | 1749 |
| | | | | stab07 | | |
| 1276 | GGAAACCGACUCUGUAGUGCUGA | 1306 | | IL13RA1: 1278U21 sense siNA | B AAAccGAcucuGuAGuGcuTT B | 1750 |
| | | | | stab07 | | |
| 1308 | UGAAGAAAGCCUCUCAGUGAUGG | 1307 | | IL13RA1: 1310U21 sense siNA | B AAGAAAGccucucAGuGAuTT B | 1751 |
| | | | | stab07 | | |
| 1424 | ACUGCACCAUUUAAAAACAGGCA | 1308 | | IL13RA1: 1426U21 sense siNA | B uGcAccAuuuAAAAAcAGGTT B | 1752 |
| | | | | stab07 | | |
| 2186 | CAGCAUUUUCCUCUGCUUUGAAA | 1309 | | IL13RA1: 2188U21 sense siNA | B GcAuuuuccucuGcuuuGATT B | 1753 |
| | | | | stab07 | | |
| 2270 | CCAAGACCUUUCAAAGCCAUUUU | 1310 | | IL13RA1: 2272U21 sense siNA | B AAGAccuuucAAAGccAuuTT B | 1754 |
| | | | | stab07 | | |
| 408 | AAGGUGAUCCUGAGUCUGCUGUG | 1303 | | IL13RA1: 428L21 antisense siNA | cAGcAGAcucAGGAucAccTsT | 1755 |
| | | | | (410C) stab11 | | |
| 657 | UGGUCAAGGAUAAUGCAGGAAAA | 1304 | | IL13RA1: 677L21 antisense siNA | uuccuGcAuuAuccuuGAcTsT | 1756 |
| | | | | (659C) stab11 | | |
| 871 | CGUCCAAGAGGCUAAAUGUGAGA | 1305 | | IL13RA1: 891L21 antisense siNA | ucAcAuuuAGccucuuGGATsT | 1757 |
| | | | | (873C) stab11 | | |
| 1276 | GGAAACCGACUCUGUAGUGCUGA | 1306 | | IL13RA1: 1296L21 antisense siNA | AGcAcuAcAGAGucGGuuuTsT | 1758 |
| | | | | (1278C) stab11 | | |
| 1308 | UGAAGAAAGCCUCUCAGUGAUGG | 1307 | | IL13RA1: 1328L21 antisense siNA | AucAcuGAGAGGcuuucuuTsT | 1759 |
| | | | | (1310C) stab11 | | |
| 1424 | ACUGCACCAUUUAAAAACAGGCA | 1308 | | IL13RA1: 1444L21 antisense siNA | ccuGuuuuuAAAuGGuGcATsT | 1760 |
| | | | | (1426C) stab11 | | |
| 2186 | CAGCAUUUUCCUCUGCUUUGAAA | 1309 | | IL13RA1: 2206L21 antisense siNA | ucAAAGcAGAGGAAAAuGcTsT | 1761 |
| | | | | (2188C) stab11 | | |
| 2270 | CCAAGACGUUUCAAAGCCAUUUU | 1310 | | IL13RA1: 2290L21 antisense siNA | AAuGGcuuuGAAAGGucuuTsT | 1762 |
| | | | | (2272C) stab11 | | |
| 408 | AAGGUGAUCCUGAGUCUGCUGUG | 1303 | | IL13RA1: 410U21 sense siNA | B GGuGAuccuGAGucuGcuGTT B | 1763 |
| | | | | stab18 | | |
| 657 | UGGUCAAGGAUAAUGCAGGAAAA | 1304 | | IL13RA1: 659U21 sense siNA | B GucAAGGAuAAuGcAGGAATT B | 1764 |
| | | | | stab18 | | |
| 871 | CGUCCAAGAGGCUAAAUGUGAGA | 1305 | | IL13RA1: 873U21 sense siNA | B uccAAGAGGcuAAAuGuGATT B | 1765 |
| | | | | stab18 | | |
| 1276 | GGAAACCGACUCUGUAGUGCUGA | 1306 | | IL13RA1: 1278U21 sense siNA | B AAAccGAcucuGuAGuGcuTT B | 1766 |
| | | | | stab18 | | |
| 1308 | UGAAGAAAGCCUCUCAGUGAUGG | 1307 | | IL13RA1: 1310U21 sense siNA | B AAGAAAGccucucAGuGAuTT B | 1767 |
| | | | | stab18 | | |
| 1424 | ACUGCACCAUUUAAAAACAGGCA | 1308 | | IL13RA1: 1426U21 sense siNA | B uGcAccAuuuAAAAAcAGGTT B | 1768 |
| | | | | stab18 | | |
| 2186 | CAGCAUUUUCCUCUGCUUUGAAA | 1309 | | IL13RA1: 2188U21 sense siNA | B GcAuuuuccucuGcuuuGATT B | 1769 |
| | | | | stab18 | | |
| 2270 | CCAAGACCUUUCAAAGCCAUUUU | 1310 | | IL13RA1: 2272U21 sense siNA | B AAGAccuuucAAAGccAuuTT B | 1770 |
| | | | | stab18 | | |
| 408 | AAGGUGAUCCUGAGUCUGCUGUG | 1303 | | IL13RA1: 428L21 antisense siNA | cAGcAGAcucAGGAucAccTsT | 1771 |
| | | | | (410C) stab08 | | |
| 657 | UGGUCAAGGAUAAUGCAGGAAAA | 1304 | | IL13RA1: 677L21 antisense siNA | uuccuGcAuuAuccuuGAcTsT | 1772 |
| | | | | (659C) stab08 | | |
| 871 | CGUCCAAGAGGCUAAAUGUGAGA | 1305 | | IL13RA1: 891L21 antisense siNA | ucAcAuuuAGccucuuGGATsT | 1773 |
| | | | | (873C) stab08 | | |
| 1276 | GGAAACCGACUCUGUAGUGCUGA | 1306 | | IL13RA1: 1296L21 antisense siNA | AGcAcuAcAGAGucGGuuuTsT | 1774 |
| | | | | (1278C) stab08 | | |
| 1308 | UGAAGAAAGCCUCUCAGUGAUGG | 1307 | | IL13RA1: 1328L21 antisense siNA | AucAcuGAGAGGcuuucuuTsT | 1775 |
| | | | | (1310C) stab08 | | |
| 1424 | ACUGCACCAUUUAAAAACAGGCA | 1308 | | IL13RA1: 1444L21 antisense siNA | ccuGuuuuuAAAuGGuGcATsT | 1776 |
| | | | | (1426C) stab08 | | |
| 2186 | CAGCAUUUUCCUCUGCUUUGAAA | 1309 | | IL13RA1: 2206L21 antisense siNA | ucAAAGcAGAGGAAAAuGcTsT | 1777 |
| | | | | (2188C) stab08 | | |
| 2270 | CCAAGACCUUUCAAAGCCAUUUU | 1310 | | IL13RA1: 2290L21 antisense siNA | AAuGGcuuuGAAAGGucuuTsT | 1778 |
| | | | | (2272C) stab08 | | |
| 408 | AAGGUGAUCCUGAGUCUGCUGUG | 1303 | 36906 | IL13RA1: 410U21 sense siNA | B GGUGAUCCUGAGUCUGCUGTT B | 1779 |
| | | | | stab09 | | |
| 657 | UGGUCAAGGAUAAUGCAGGAAAA | 1304 | 36907 | IL13RA1: 659U21 sense siNA | B GUCAAGGAUAAUGCAGGAATT B | 1780 |
| | | | | stab09 | | |
| 871 | CGUCCAAGAGGCUAAAUGUGAGA | 1305 | 36908 | IL13RA1: 873U21 sense siNA | B UCCAAGAGGCUAAAUGUGATT B | 1781 |
| | | | | stab09 | | |
| 1276 | GGAAACCGACUCUGUAGUGCUGA | 1306 | 36909 | IL13RA1: 1278U21 sense siNA | B AAACCGACUCUGUAGUGCUTT B | 1782 |
| | | | | stab09 | | |
| 1308 | UGAAGAAAGCCUCUCAGUGAUGG | 1307 | 36910 | IL13RA1: 1310U21 sense siNA | B AAGAAAGCCUCUCAGUGAUTT B | 1783 |
| | | | | stab09 | | |
| 1424 | ACUGCACCAUUUAAAAACAGGCA | 1308 | 36911 | IL13RA1: 1426U21 sense siNA | B UGCACCAUUUAAAAACAGGTT B | 1784 |
| | | | | stab09 | | |
| 2186 | CAGCAUUUUCCUCUGCUUUGAAA | 1309 | 36912 | IL13RA1: 2188U21 sense siNA | B GCAUUUUCCUCUGCUUUGATT B | 1785 |
| | | | | stab09 | | |
| 2270 | CCAAGACCUUUCAAAGCCAUUUU | 1310 | 36913 | IL13RA1: 2272U21 sense siNA | B AAGACCUUUCAAAGCCAUUTT B | 1786 |
| | | | | stab09 | | |
| 408 | AAGGUGAUCCUGAGUCUGCUGUG | 1303 | | IL13RA1: 428L21 antisense siNA | CAGCAGACUCAGGAUCACCTsT | 1787 |
| | | | | (410C) stab10 | | |
| 657 | UGGUCAAGGAUAAUGCAGGAAAA | 1304 | | IL13RA1: 677L21 antisense siNA | UUCCUGCAUUAUCCUUGACTsT | 1788 |
| | | | | (659C) stab10 | | |
| 871 | CGUCCAAGAGGCUAAAUGUGAGA | 1305 | | IL13RA1: 891L21 antisense siNA | UCACAUUUAGCCUCUUGGATsT | 1789 |
| | | | | (873C) stab10 | | |
| 1276 | GGAAACCGACUCUGUAGUGCUGA | 1306 | | IL13RA1: 1296L21 antisense siNA | AGCACUACAGAGUCGGUUUTsT | 1790 |
| | | | | (1278C) stab10 | | |
| 1308 | UGAAGAAAGCCUCUCAGUGAUGG | 1307 | | IL13RA1: 1328L21 antisense siNA | AUCACUGAGAGGCUUUCUUTsT | 1791 |
| | | | | (1310C) stab10 | | |
| 1424 | ACUGCACCAUUUAAAAACAGGCA | 1308 | | IL13RA1: 1444L21 antisense siNA | CCUGUUUUUAAAUGGUGCATsT | 1792 |
| | | | | (1426C) stab10 | | |
| 2186 | CAGCAUUUUCCUCUGCUUUGAAA | 1309 | | IL13RA1: 2206L21 antisense siNA | UCAAAGCAGAGGAAAAUGCTsT | 1793 |
| | | | | (2188C) stab10 | | |
| 2270 | CCAAGACCUUUCAAAGCCAUUUU | 1310 | | IL13RA1: 2290L21 antisense siNA | AAUGGCUUUGAAAGGUCUUTsT | 1794 |
| | | | | (2272C) stab10 | | |
| 408 | AAGGUGAUCCUGAGUCUGCUGUG | 1303 | | IL13RA1: 428L21 antisense siNA | CAGcAGAcucAGGAucAccTT B | 1795 |
| | | | | (410C) stab19 | | |
| 657 | UGGUCAAGGAUAAUGCAGGAAAA | 1304 | | IL13RA1: 677L21 antisense siNA | uuccuGcAuuAuccuuGAcTT B | 1796 |
| | | | | (659C) stab19 | | |
| 871 | CGUCCAAGAGGCUAAAUGLiGAGA | 1305 | | IL13RA1: 891L21 antisense siNA | ucAcAuuuAGccucuuGGATT B | 1797 |
| | | | | (873C) stab19 | | |
| 1276 | GGAAACCGACUCUGUAGUGCUGA | 1306 | | IL13RA1: 1296L21 antisense siNA | AGcAcuAcAGAGucGGuuuTT B | 1798 |
| | | | | (1278C) stab19 | | |
| 1308 | UGAAGAAAGCCUCUCAGUGAUGG | 1307 | | IL13RA1: 1328L21 antisense siNA | AucAcuGAGAGGcuuucuuTT B | 1799 |
| | | | | (1310C) stab19 | | |
| 1424 | ACUGCACCAUUUAAAAACAGGCA | 1308 | | IL13RA1: 1444L21 antisense siNA | ccuGuuuuuAAAuGGuGcATT B | 1800 |
| | | | | (1426C) stab19 | | |
| 2186 | CAGCAUUUUCCUCUGCUUUGAAA | 1309 | | IL13RA1: 2206L21 antisense siNA | ucAAAGcAGAGGAAAAuGcTT B | 1801 |
| | | | | (2188C) stab19 | | |
| 2270 | CCAAGACCUUUCAAAGCCAUUUU | 1310 | | IL13RA1: 2290L21 antisense siNA | AAuGGcuuuGAAAGGucuuTT B | 1802 |
| | | | | (2272C) stab19 | | |
| 408 | AAGGUGAUCCUGAGUCUGCUGUG | 1303 | 36914 | IL13RA1: 428L21 antisense siNA | CAGCAGACUCAGGAUCACCTT B | 1803 |
| | | | | (410C) stab22 | | |
| 657 | UGGUCAAGGAUAAUGCAGGAAAA | 1304 | 36915 | IL13RA1: 677L21 antisense siNA | UUCCUGCAUUAUCCUUGACTT B | 1804 |
| | | | | (659C) stab22 | | |
| 871 | CGUCCAAGAGGCUAAAUGUGAGA | 1305 | 36916 | IL13RA1: 891L21 antisense siNA | UCACAUUUAGCCUCUUGGATT B | 1805 |
| | | | | (873C) stab22 | | |
| 1276 | GGAAACCGACUCUGUAGUGCUGA | 1306 | 36917 | IL13RA1: 1296L21 antisense siNA | AGCACUACAGAGUCGGUUUTT B | 1806 |
| | | | | (1278C) stab22 | | |
| 1308 | UGAAGAAAGCCUCUCAGUGAUGG | 1307 | 36918 | IL13RA1: 1328L21 antisense siNA | AUCACUGAGAGGCUUUCUUTT B | 1807 |
| | | | | (1310C) stab22 | | |
| 1424 | ACUGCACCAUUUAAAAACAGGCA | 1308 | 36919 | IL13RA1: 1444L21 antisense siNA | CCUGUUUUUAAAUGGUGCATT B | 1808 |
| | | | | (1426C) stab22 | | |
| 2186 | CAGCAUUUUCCUCUGCUUUGAAA | 1309 | 36920 | IL13RA1: 2206L21 antisense siNA | UCAAAGCAGAGGAAAAUGCTTB | 1809 |
| | | | | (2188C) stab22 | | |
| 2270 | CCAAGACCUUUCAAAGCCAUUUU | 1310 | 36921 | IL13RA1: 2290L21 antisense siNA | AAUGGCUUUGAAAGGUCUUTT B | 1810 |
| | | | | (2272C) stab22 | | |

Non-Human IL and ILR

| | | | | | | |
|---|---|---|---|---|---|---|
| 222 | UGCAACGGCAGCAUGGUAUGGAG | 1811 | 33365 | mIL13: 222U21 sense siNA stab07 | B cAAcGGcAGcAuGGuAuGGTT B | 1981 |
| 223 | GCAACGGCAGCAUGGUAUGGAGU | 1812 | 33366 | mIL13: 223U21 sense siNA stab07 | B AAcGGcAGcAuGGuAuGGATT B | 1982 |
| 224 | CAACGGCAGCAUGGUAUGGAGUG | 1813 | 33367 | mIL13: 224U21 sense siNA stab07 | B AcGGcAGcAuGGuAuGGAGTT B | 1983 |
| 780 | UUAUGGUUGUGUGUUAUUUAAAU | 1814 | 33368 | mIL13: 780U21 sense siNA stab07 | B AuGGuuGuGuGuuAuuuAATT B | 1984 |
| 781 | UAUGGUUGUGUGUUAUUUAAAUG | 1815 | 33369 | mIL13: 781U21 sense siNA stab07 | B uGGuuGuGuGuuAuuuAAATT B | 1985 |
| 782 | AUGGUUGUGUGUUAUUUAAAUGA | 1816 | 33370 | mIL13: 782U21 sense siNA stab07 | B GGuuGuGuGuuAuuuAAAuTT B | 1986 |
| 783 | UGGUUGUGUGUUAUUUAAAUGAG | 1817 | 33371 | mIL13: 783U21 sense siNA stab07 | B GuuGuGuGuuAuuuAAAuGTT B | 1987 |
| 906 | CAUAACUCUGCUACCUCACUGUA | 1818 | 33372 | mIL13: 906U21 sense siNA stab07 | B uAAcucuGcuAccucAcuGTT B | 1988 |
| 1057 | AAUAGCUUAGCAAAGAGUUAAUA | 1819 | 33373 | mIL13: 1057U21 sense siNA | B uAGcuuAGcAAAGAGuuAATT B | 1989 |
| | | | | stab07 | | |
| 1059 | UAGCUUAGCAAAGAGUUAAUAAU | 1820 | 33374 | mIL13: 1059U21 sense siNA | B GcuuAGcAAAGAGuuAAuATT B | 1990 |
| | | | | stab07 | | |
| 222 | UGCAACGGCAGCAUGGUAUGGAG | 1811 | 33385 | mIL13: 240L21 antisense siNA | ccAuAccAuGcuGccGuuGTsT | 1991 |
| | | | | (222C) stab08 | | |
| 223 | GCAACGGCAGCAUGGUAUGGAGU | 1812 | 33386 | mIL13: 241L21 antisense siNA | uccAuAccAuGcuGccGuuTsT | 1992 |
| | | | | (223C) stab08 | | |
| 224 | CAACGGCAGCAUGGUAUGGAGUG | 1813 | 33387 | mIL13: 242L21 antisense siNA | cuccAuAccAuGcuGccGuTsT | 1993 |
| | | | | (224C) stab08 | | |
| 780 | UUAUGGUUGUGUGUUAUUUAAAU | 1814 | 33388 | mIL13: 798L21 antisense siNA | uuAAAuAAcAcAcAAccAuTsT | 1994 |
| | | | | (780C) stab08 | | |
| 781 | UAUGGUUGUGUGUUAUUUAAAUG | 1815 | 33389 | mIL13: 799L21 antisense siNA | uuuAAAuAAcAcAcAAccATsT | 1995 |
| | | | | (781C) stab08 | | |
| 782 | AUGGUUGUGUGUUAUUUAAAUGA | 1816 | 33390 | mIL13: 800L21 antisense siNA | AuuuAAAuAAcAcAcAAccTsT | 1996 |
| | | | | (782C) stab08 | | |
| 783 | UGGUUGUGUGUUAUUUAAAUGAG | 1817 | 33391 | mIL13: 801L21 antisense siNA | cAuuuAAAuAAcAcAcAAcTsT | 1997 |
| | | | | (783C) stab08 | | |
| 906 | CAUAACUCUGCUACCUCACUGUA | 1818 | 33392 | mIL13: 924L21 antisense siNA | cAGuGAGGuAGcAGAGuuATsT | 1998 |
| | | | | (906C) stab08 | | |
| 1057 | AAUAGCUUAGCAAAGAGUUAAUA | 1819 | 33393 | mIL13: 1075L21 antisense siNA | uuAAcucuuuGcuAAGcuATsT | 1999 |
| | | | | (1057C) stab08 | | |
| 1059 | UAGCUUAGCAAAGAGUUAAUAAU | 1820 | 33394 | mIL13: 1077L21 antisense siNA | uAuuAAcucuuuGcuAAGcTsT | 2000 |
| | | | | (1059C) stab08 | | |
| 11 | CUGGGUGACUGCAGUCCUGGCUC | 1821 | 38093 | rIL13: 11U21 sense siNA stab07 | B GGGuGAcuGcAGuccuGGcTT B | 2001 |
| 14 | GGUGACUGCAGUCCUGGCUCUCG | 1822 | 38094 | rIL13: 14U21 sense siNA stab07 | B uGAcuGcAGuccuGGcucuTT B | 2002 |
| 15 | GUGACUGCAGUCCUGGCUCUCGC | 1823 | 38095 | rIL13: 15U21 sense siNA stab07 | B GAcuGcAGuccuGGcucucTT B | 2003 |
| 16 | UGACUGCAGUCCUGGCUCUCGCU | 1824 | 38096 | rIL13: 16U21 sense siNA stab07 | B AcuGcAGuccuGGcucucGTT B | 2004 |
| 17 | GACUGCAGUCCUGGCUCUCGCUU | 1825 | 38097 | rIL13: 17U21 sense siNA stab07 | B cuGcAGuccuGGcucucGcTT B | 2005 |
| 99 | CUCAGGGAGCUUAUCGAGGAGCU | 1826 | 38098 | rIL13: 99U21 sense siNA stab07 | B cAGGGAGcuuAucGAGGAGTT B | 2006 |
| 113 | CGAGGAGCUGAGCAACAUCACAC | 1827 | 38099 | rIL13: 113U21 sense siNA stab07 | B AGGAGcuGAGcAAcAucAcTT B | 2007 |
| 114 | GAGGAGCUGAGCAACAUCACACA | 1828 | 38100 | rIL13: 114U21 sense siNA stab07 | B GGAGcuGAGcAAcAucAcATT B | 2008 |
| 115 | AGGAGCUGAGCAACAUCACACAA | 1829 | 38101 | rIL13: 115U21 sense siNA stab07 | B GAGcuGAGcAAcAucAcAcTT B | 2009 |
| 116 | GGAGCUGAGCAACAUCACACAAG | 1830 | 38102 | rIL13: 116U21 sense siNA stab07 | B AGcuGAGcAAcAucAcAcATT B | 2010 |
| 117 | GAGCUGAGCAACAUCACACAAGA | 1831 | 38103 | rIL13: 117U21 sense siNA stab07 | B GcuGAGcAAcAucAcAcAATT B | 2011 |
| 120 | CUGAGCAACAUCACACAAGACCA | 1832 | 38104 | rIL13: 120U21 sense siNA stab07 | B GAGcAAcAucAcAcAAGAcTT B | 2012 |
| 121 | UGAGCAACAUCACACAAGACCAG | 1833 | 38105 | rIL13: 121U21 sense siNA stab07 | B AGcAAcAucAcAcAAGAccTT B | 2013 |
| 122 | GAGCAACAUCACACAAGACCAGA | 1834 | 38106 | rIL13: 122U21 sense siNA stab07 | B GcAAcAucAcAcAAGAccATT B | 2014 |
| 123 | AGCAACAUCACACAAGACCAGAA | 1835 | 38107 | rIL13: 123U21 sense siNA stab07 | B cAAcAucAcAcAAGAccAGTT B | 2015 |
| 124 | GCAACAUCACACAAGACCAGAAG | 1836 | 38108 | rIL13: 124U21 sense siNA stab07 | B AAcAucAcAcAAGAccAGATT B | 2016 |
| 141 | CAGAAGACUUCCCUGUGCAACAG | 1837 | 38109 | rIL13: 141U21 sense siNA stab07 | B GAAGAcuucccuGuGcAAcTT B | 2017 |
| 159 | AACAGCAGCAUGGUAUGGAGCGU | 1838 | 38110 | rIL13: 159U21 sense siNA stab07 | B cAGcAGcAuGGuAuGGAGcTT B | 2018 |
| 188 | GACAGCUGGCGGGUUCUGUGCAG | 1839 | 38111 | rIL13: 188U21 sense siNA stab07 | B cAGcuGGcGGGuucuGuGcTT B | 2019 |
| 217 | AAUCCCUGACCAACAUCUCCAGU | 1840 | 38112 | rIL13: 217U21 sense siNA stab07 | B ucccuGAccAAcAucuccATT B | 2020 |
| 237 | AGUUGCAAUGCCAUCCACAGGAC | 1841 | 38113 | rIL13: 237U21 sense siNA stab07 | B uuGcAAuGccAuccAcAGGTT B | 2021 |
| 252 | CACAGGACCCAGAGGAUAUUGAA | 1842 | 38114 | rIL13: 252U21 sense siNA stab07 | B cAGGAcccAGAGGAuAuuGTT B | 2022 |
| 319 | CAGAUACCAAAAUCGAAGUAGCC | 1843 | 38115 | rIL13: 319U21 sense siNA stab07 | B GAuAccAAAAucGAAGuAGTT B | 2023 |
| 320 | AGAUACCAAAAUCGAAGUAGCCC | 1844 | 38116 | rIL13: 320U21 sense siNA stab07 | B AuAccAAAAucGAAGuAGcTT B | 2024 |
| 321 | GAUACCAAAAUCGAAGUAGCCCA | 1845 | 38117 | rIL13: 321U21 sense siNA stab07 | B uAccAAAAucGAAGuAGccTT B | 2025 |
| 322 | AUACCAAAAUCGAAGUAGCCCAG | 1846 | 38118 | rfLI3: 322U21 sense siNA stab07 | B AccAAAAucGAAGuAGcccTT B | 2026 |
| 323 | UACCAAAAUCGAAGUAGCCCAGU | 1847 | 38119 | rIL13: 323U21 sense siNA stab07 | B ccAAAAucGAAGuAGcccATT B | 2027 |
| 360 | CUCAAUUACUCCAAGCAACUUUU | 1848 | 38120 | rIL13: 360U21 sense siNA stab07 | B cAAuuAcuccAAGcAAcuuTT B | 2028 |
| 361 | UCAAUUACUCCAAGCAACUUUUC | 1849 | 38121 | rIL13: 361U21 sense siNA stab07 | B AAuuAcuccAAGcAAcuuuTT B | 2029 |
| 362 | CAAUUACUCCAAGCAACUUUUCC | 1850 | 38122 | rIL13: 362U21 sense siNA stab07 | B AuuAcuccAAGcAAcuuuuTT B | 2030 |
| 375 | CAACUUUUCCGCUAUGGCCACUG | 1851 | 38123 | rIL13: 375U21 sense siNA stab07 | B AcuuuuccGcuAuGGccAcTT B | 2031 |
| 420 | CUCAGCUGUGGACCUCAGUUGUG | 1852 | 38124 | rIL13: 420U21 sense siNA stab07 | B cAGcuGuGGAccucAGuuGTT B | 2032 |
| 11 | CUGGGUGACUGCAGUCCUGGCUC | 1821 | 38125 | rIL13: 29L21 antisense siNA | GCCAGGAcuGcAGucAcccTT | 2033 |
| | | | | (11C) stab26 | | |
| 14 | GGUGACUGCAGUCCUGGCUCUCG | 1822 | 38126 | rIL13: 32L21 antisense siNA | AGAGccAGGAcuGcAGucATT | 2034 |
| | | | | (14C) stab26 | | |
| 15 | GUGACUGCAGUCCUGGCUCUCGC | 1823 | 38127 | rIL13: 33L21 antisense siNA | GAGAGccAGGAcuGcAGucTT | 2035 |
| | | | | (15C) stab26 | | |
| 16 | UGACUGCAGUCCUGGCUCUCGCU | 1824 | 38128 | rIL13: 34L21 antisense siNA | CGAGAGccAGGAcuGcAGuTT | 2036 |
| | | | | (16C) stab26 | | |
| 17 | GACUGCAGUCCUGGCUCUCGCUU | 1825 | 38129 | rIL13: 35L21 antisense siNA | GCGAGAGccAGGAcuGcAGTT | 2037 |
| | | | | (17C) stab26 | | |
| 99 | CUCAGGGAGCUUAUCGAGGAGCU | 1826 | 38130 | rIL13: 117L21 antisense siNA | CUCcucGAuAAGcucccuGTT | 2038 |
| | | | | (99C) stab26 | | |
| 113 | CGAGC3AGCUGAGCAACAUCACAC | 1827 | 38131 | rIL13: 131L21 antisense siNA | GUGAuGuuGcucAGcuccuTT | 2039 |
| | | | | (113C) stab26 | | |
| 114 | GAGGAGCUGAGCAACAUCACACA | 1828 | 38132 | rIL13: 132L21 antisense siNA | UGUGAUGuuGcucAGcuccTT | 2040 |
| | | | | (114C) stab26 | | |
| 115 | AGGAGCUGAGCAACAUCACACAA | 1829 | 38133 | rIL13: 133L21 antisense siNA | GUGuGAuGuuGcucAGcucTT | 2041 |
| | | | | (115C) stab26 | | |
| 116 | GGAGCUGAGCAACAUCACACAAG | 1830 | 38134 | rIL13: 134L21 antisense siNA | UGUGUGAuGuuGcucAGcuTT | 2042 |
| | | | | (116C) stab26 | | |
| 117 | GAGCUGAGCAACAUCACACAAGA | 1831 | 38135 | rIL13: 135L21 antisense siNA | UUGuGuGAuGuuGcucAGcTT | 2043 |
| | | | | (117C) stab26 | | |
| 120 | CUGAGCAACAUCACACAAGACCA | 1832 | 38136 | rIL13: 138L21 antisense siNA | GUCuuGuGuGAuGuuGcucTT | 2044 |
| | | | | (120C) stab26 | | |
| 121 | UGAGCAACAUCACACAAGACCAG | 1833 | 38137 | rIL13: 139L21 antisense siNA | GGUcuuGuGuGAuGuuGcuTT | 2045 |
| | | | | (121C) stab26 | | |
| 122 | GAGCAACAUCACACAAGACCAGA | 1834 | 38138 | rIL13: 140L21 antisense siNA | UGGucuuGuGuGAuGuuGcTT | 2046 |
| | | | | (122C) stab26 | | |
| 123 | AGCAACAUCACACAAGACCAGAA | 1835 | 38139 | rIL13: 141L21 antisense siNA | CUGGucuuGuGuGAuGuuGTT | 2047 |
| | | | | (123C) stab26 | | |
| 124 | GCAACAUCACACAAGACCAGAAG | 1836 | 38140 | rIL13: 142L21 antisense siNA | UCUGGucuuGuGuGAuGuuTT | 2048 |
| | | | | (124C) stab26 | | |
| 141 | CAGAAGACUUCCCUGUGCAACAG | 1837 | 38141 | rIL13: 159L21 antisense siNA | GUUGcAcAGGGAAGucuucTT | 2049 |
| | | | | (141C) stab26 | | |
| 159 | AACAGCAGCAUGGUAUGGAGCGU | 1838 | 38142 | rIL13: 177121 antisense siNA | GCUccAuAccAuGcuGcuGTT | 2050 |
| | | | | (159C) stab26 | | |
| 188 | GACAGCUGGCGGGUUCUGUGCAG | 1839 | 38143 | rIL13: 206L21 antisense siNA | GCAcAGAAcccGccAGcuGTT | 2051 |
| | | | | (188C) stab26 | | |
| 217 | AAUCCCUGACCAACAUCUCCAGU | 1840 | 38144 | rIL13: 235L21 antisense siNA | UGGAGAuGuuGGucAGGGATT | 2052 |
| | | | | (217C) stab26 | | |
| 237 | AGUUGCAAUGCCAUCCACAGGAC | 1841 | 38145 | rIL13: 255L21 antisense siNA | CCUGuGGAuGGcAuuGcAATT | 2053 |
| | | | | (237C) stab26 | | |
| 252 | CACAGGACCCAGAGGAUAUUGAA | 1842 | 38146 | rIL13: 270L21 antisense siNA | CAAuAuccucuGGGuccuGTT | 2054 |
| | | | | (252C) stab26 | | |
| 319 | CAGAUACCAAAAUCGAAGUAGCC | 1843 | 38147 | rIL13: 337L21 antisense siNA | CUAcuucGAuuuuGGuAucTT | 2055 |
| | | | | (319C) stab26 | | |
| 320 | AGAUACCAAAAUCGAAGUAGCCC | 1844 | 38148 | rIL13: 338L21 antisense siNA | GCUAcuucGAuuuuGGuAuTT | 2056 |
| | | | | (320C) stab26 | | |
| 321 | GAUACCAAAAUCGAAGUAGooCA | 1845 | 38149 | rIL13: 339L21 antisense siNA | GGCuAcuucGAuuuuGGuATT | 2057 |
| | | | | (321C) stab26 | | |
| 322 | AUACCAAAAUCGAAGUAGCCCAG | 1846 | 38150 | rIL13: 340L21 antisense siNA | GGGcuAcuucGAuuuuGGuTT | 2058 |
| | | | | (322C) stab26 | | |
| 323 | UACCAAAAUCGAAGUAGCCCAGU | 1847 | 38151 | rIL13: 341L21 antisense siNA | UGGGcuAcuucGAuuuuGGTT | 2059 |
| | | | | (323C) stab26 | | |
| 360 | CUCAAUUACUCCAAGCAACUUUU | 1848 | 38152 | rIL13: 378L21 antisense siNA | AAGuuGcuuGGAGuAAuuGTT | 2060 |
| | | | | (360C) stab26 | | |
| 361 | UCAAUUACUCCAAGCAACUUUUC | 1849 | 38153 | rIL13: 379L21 antisense siNA | AAAGuuGcuuGGAGuAAuuTT | 2061 |
| | | | | (361C) stab26 | | |
| 362 | CAAUUACUCCAAGCAACUUUUCC | 1850 | 38154 | rIL13: 380L21 antisense siNA | AAAAGuuGcuuGGAGuAAuTT | 2062 |
| | | | | (362C) stab26 | | |
| 375 | CAACUUUUCCGCUAUGGCCACUG | 1851 | 38155 | rIL13: 393L21 antisense siNA | GUGGccAuAGcGGAAAAGuTT | 2063 |
| | | | | (375C) stab26 | | |
| 420 | CUCAGCUGUGGACCUCAGUUGUG | 1852 | 38156 | rIL13: 438L21 antisense siNA | CAAcuGAGGuccAcAGcuGTT | 2064 |
| | | | | (420C) stab26 | | |
| 122 | GAGCAACAUCACACAAGACCAGA | 1834 | 39525 | rIL13: 122U21 sense siNA stab00 | GCAACAUCACACAAGACCATT | 2065 |
| 122 | GAGCAACAUCACACAAGACCAGA | 1834 | 39526 | rIL13: 140L21 antisense siNA | UGGUCUUGUGUGAUGUUGCTT | 2066 |
| | | | | (122C) stab00 | | |
| 120 | CUGAGCAACAUCACACAAGACCA | 1832 | 39539 | rIL13: 120U21 sense siNA stab00 | GAGCAACAUCACACAAGACTT | 2067 |
| 321 | GAUACCAAAAUCGAAGUAGCCCA | 1845 | 39540 | rIL13: 321U21 sense siNA stab00 | UACCAAAAUCGAAGUAGCCTT | 2068 |
| 323 | UACCAAAAUCGAAGUAGCCCAGU | 1847 | 39541 | rIL13: 323U21 sense siNA stab00 | CCAAAAUCGAAGUAGCCCATT | 2069 |
| 120 | CUGAGCAACAUCACACAAGACCA | 1832 | 39542 | rIL13: 138L21 antisense siNA | GUCUUGUGUGAUGUUGCUCTT | 2070 |
| | | | | (120C) stab00 | | |
| 321 | GAUACCAAAAUCGAAGUAGCCCA | 1845 | 39543 | rIL13: 339L21 antisense siNA | GGCUACUUCGAUUUUGGUATT | 2071 |
| | | | | (321C) stab00 | | |
| 323 | UACCAAAAUCGAAGUAGCCCAGU | 1847 | 39544 | rIL13: 341L21 antisense siNA | UGGGCUACUUCGAUUUUGGTT | 2072 |
| | | | | (323C) stab00 | | |
| 110 | GCCACAGAAGUUCAGCCACCUGU | 1853 | 38157 | rIL13RA1: 110U21 sense siNA | B cAcAGAAGuucAGccAccuTT B | 2073 |
| | | | | stab07 | | |
| 112 | CACAGAAGUUCAGCCACCUGUGA | 1854 | 38158 | rIL13RA1: 112U21 sense siNA | B cAGAAGuucAGccAccuGuTT B | 2074 |
| | | | | stab07 | | |
| 113 | ACAGAAGUUCAGCCACCUGUGAC | 1855 | 38159 | rIL13RA1: 113U21 sense siNA | B AGAAGuucAGccAccuGuGTT B | 2075 |
| | | | | stab07 | | |
| 123 | AGCCACCUGUGACGAAUUUGAGU | 1856 | 38160 | rIL13RA1: 123U21 sense siNA | B ccAccuGuGAcGAAuuuGATT B | 2076 |
| | | | | stab07 | | |
| 148 | CUCUGUCGAAAAUCUCUGCACAA | 1857 | 38161 | rIL13RA1: 148U21 sense siNA | B cuGucGAAAAucucuGcAcTT B | 2077 |
| | | | | stab07 | | |
| 343 | UGAAAGUGAGAAGCCUAGCCCUU | 1858 | 38162 | rIL13RA1: 343U21 sense siNA | B AAAGuGAGAAGccuAGcccTT B | 2078 |
| | | | | stab07 | | |
| 347 | AGUGAGAAGCCUAGCCCUUUGGU | 1859 | 38163 | rIL13RA1: 347U21 sense siNA | B uGAGAAGccuAGcccuuuGTT B | 2079 |
| | | | | stab07 | | |
| 350 | GAGAAGCCUAGCCCUUUGGUGAA | 1860 | 38164 | rIL13RA1: 350U21 sense siNA | B GAAGccuAGcccuuuGGuGTT B | 2080 |
| | | | | stab07 | | |
| 356 | CCUAGCCCUUUGGUGAAAAAGUG | 1861 | 38165 | rIL13RA1: 356U21 sense siNA | B uAGcccuuuGGuGAAAAAGTT B | 2081 |
| | | | | stab07 | | |
| 362 | CCUUUGGUGAAAAAGUGCAUCUC | 1862 | 38166 | rIL13RA1: 362U21 sense siNA | B uuuGGuGAAAAAGuGcAucTT B | 2082 |
| | | | | stab07 | | |
| 363 | CUUUGGUGAAAAAGUGCAUCUCA | 1863 | 38167 | rIL13RA1: 363U21 sense siNA | B uuGGuGAAAAAGuGcAucuTT B | 2083 |
| | | | | stab07 | | |
| 365 | UUGGUGAAAAAGUGCAUCUCACC | 1864 | 38168 | rIL13RA1: 365U21 sense siNA | B GGuGAAAAAGuGcAucucATT B | 2084 |
| | | | | stab07 | | |
| 419 | GAACUGCAGUGCACUUGGCACAA | 1865 | 38169 | rIL13RA1: 419U21 sense siNA | B AcuGcAGuGcAcuuGGcAcTT B | 2085 |
| | | | | stab07 | | |
| 424 | GCAGUGCACUUGGCACAACCUGA | 1866 | 38170 | rIL13RA1: 424U21 sense siNA | B AGuGcAcuuGGcAcAAccuTT B | 2086 |
| | | | | stab07 | | |
| 464 | UGGCUCCCUGGAAAGAAUACAAG | 1867 | 38171 | rIL13RA1: 464U21 sense siNA | B GcucccuGGAAAGAAuAcATT B | 2087 |
| | | | | stab07 | | |
| 529 | GGGGAAAAGUCUUCAAUGUGAAA | 1868 | 38172 | rIL13RA1: 529U21 sense siNA | B GGAAAAGucuucAAuGuGATT B | 2088 |
| | | | | stab07 | | |
| 585 | CCUUUAAAUUGACUAAAGUGGAA | 1869 | 38173 | rIL13RA1: 585U21 sense siNA | B uuuAAAuuGAcuAAAGuGGTT B | 2089 |
| | | | | stab07 | | |
| 636 | UAAUGGUCAAGGAUAAUGCUGGG | 1870 | 38174 | rIL13RA1: 636U21 sense siNA | B AuGGucAAGGAuAAuGcuGTT B | 2090 |
| | | | | stab07 | | |
| 637 | AAUGGUCAAGGAUAAUGCUGGGA | 1871 | 38175 | rIL13RA1: 637U21 sense siNA | B uGGucAAGGAuAAuGcuGGTT B | 2091 |
| | | | | stab07 | | |
| 638 | AUGGUCAAGGAUAAUGCUGGGAA | 1872 | 38176 | rIL13RA1: 638U21 sense siNA | B GGucAAGGAuAAuGcuGGGTT B | 2092 |
| | | | | stab07 | | |
| 640 | GGUCAAGGAUAAUGCUGGGAAAA | 1873 | 38177 | rIL13RA1: 640U21 sense siNA | B ucAAGGAuAAuGcuGGGAATT B | 2093 |
| | | | | stab07 | | |
| 646 | GGAUAAUGCUGGGAAAAUUAGGC | 1874 | 38178 | rIL13RA1: 646U21 sense siNA | B AuAAuGcuGGGAAAAuuAGTT B | 2094 |
| | | | | stab07 | | |
| 649 | UAAUGCUGGGAAAAUUAGGCCAU | 1875 | 38179 | rIL13RA1: 649U21 sense siNA | B AuGcuGGGAAAAuuAGGccTT B | 2095 |
| | | | | stab07 | | |
| 650 | AAUGCUGGGAAAAUUAGGCCAUC | 1876 | 38180 | rIL13RA1: 650U21 sense siNA | B uGcuGGGAAAAuuAGGccATT B | 2096 |
| | | | | stab07 | | |
| 654 | CUGGGAAAAUUAGGCCAUCCUAC | 1877 | 38181 | rIL13RA1: 654U21 sense siNA | B GGGAAAAuuAGGccAuccuTT B | 2097 |
| | | | | stab07 | | |
| 733 | UUUCCUCAAAAAUGGUGCCUUAU | 1878 | 38182 | rIL13RA1: 733U21 sense siNA | B uccucAAAAAuGGuGccuuTT B | 2098 |
| | | | | stab07 | | |
| 734 | UUCCUCAAAAAUGGUGCCUUAUU | 1879 | 38183 | rIL13RA1: 734U21 sense siNA | B ccucAAAAAuGGuGccuuATT B | 2099 |
| | | | | stab07 | | |
| 858 | AGAGGUUGAAGAGGACAAAUGCC | 1880 | 38184 | rIL13RA1: 856U21 sense siNA | B AGGuuGAAGAGGAcAAAuGTT B | 2100 |
| | | | | stab07 | | |
| 863 | GAAGAGGACAAAUGCCAGAAUUC | 1881 | 38185 | rIL13RA1: 863U21 sense siNA | B AGAGGAcAAAuGccAGAAuTT B | 2101 |
| | | | | stab07 | | |
| 876 | GCCAGAAUUCUGAAUUUGAUAGA | 1882 | 38186 | rIL13RA1: 876U21 sense siNA | B cAGAAuucuGAAuuuGAuATT B | 2102 |
| | | | | stab07 | | |
| 877 | CCAGAAUUCUGAAUUUGAUAGAA | 1883 | 38187 | rIL13RA1: 877U21 sense siNA | B AGAAuucuGAAuuuGAuAGTT B | 2103 |
| | | | | stab07 | | |
| 890 | UUUGAUAGAAACAUGGAGGGUGC | 1884 | 38188 | rIL13RA1: 890U21 sense siNA | B uGAuAGAAAcAuGGAGGGuTT B | 2104 |
| | | | | stab07 | | |
| 1008 | UGUGGAGUAAUUGGAGCGAAGCG | 1885 | 38189 | rIL13RA1: 1008U21 sense siNA | B uGGAGuAAuuGGAGcGAAGTT B | 2105 |
| | | | | stab07 | | |
| 1009 | GUGGAGUAAUUGGAGCGAAGCGC | 1886 | 38190 | rIL13RA1: 1009U21 sense siNA | B GGAGuAAuuGGAGcGAAGcTT B | 2106 |
| | | | | stab07 | | |
| 1010 | UGGAGUAAUUGGAGCGAAGCGCU | 1887 | 38191 | rIL13RA1: 1010U21 sense siNA | B GAGuAAuuGGAGcGAAGcGTT B | 2107 |
| | | | | stab07 | | |
| 1137 | GGCUUAAGAUCAUUAUAUUUCCU | 1888 | 38192 | rIL13RA1: 1137U21 sense siNA | B cuuAAGAucAuuAuAuuucTT B | 2108 |
| | | | | stab07 | | |
| 1153 | AUUUCCUCCAAUUCCUGAUCCUG | 1889 | 38193 | rIL13RA1: 1153U21 sense siNA | B uuccuccAAuuccuGAuccTT B | 2109 |
| | | | | stab07 | | |
| 1161 | CAAUUCCUGAUCCUGGCAAGAUU | 1890 | 38194 | rIL13RA1: 1161U21 sense siNA | B AuuccuGAuccuGGcAAGATT B | 2110 |
| | | | | stab07 | | |
| 1163 | AUUCCUGAUCCUGGCAAGAUUUU | 1891 | 38195 | rIL13RA1: 1163U21 sense siNA | B uccuGAuccuGGcAAGAuuTT B | 2111 |
| | | | | stab07 | | |
| 1164 | UUCCUGAUCCUGGCAAGAUUUUU | 1892 | 38196 | rIL13RA1: 1164U21 sense siNA | B ccuGAuccuGGcAAGAuuuTT B | 2112 |
| | | | | stab07 | | |
| 1172 | CCUGGCAAGAUUUUUAAAGAAAU | 1893 | 38197 | rIL13RA1: 1172U21 sense siNA | B uGGcAAGAuuuuuAAAGAATT B | 2113 |
| | | | | stab07 | | |
| 1182 | UUUUUAAAGAAAUGUUUGGAGAC | 1894 | 38198 | rIL13RA1: 1182U21 sense siNA | B uuuAAAGAAAuGuuuGGAGTT B | 2114 |
| | | | | stab07 | | |
| 1198 | UGGAGACCAGAAUGAUGAUACCC | 1895 | 38199 | rIL13RA1: 1198U21 sense siNA | B GAGAccAGAAuGAuGAuAcTT B | 2115 |
| | | | | stab07 | | |
| 1199 | GGAGACCAGAAUGAUGAUACCCU | 1896 | 38200 | rIL13RA1: 1199U21 sense siNA | B AGAccAGAAuGAuGAuAccTT B | 2116 |
| | | | | stab07 | | |
| 1202 | GACCAGAAUGAUGAUAQCCUGCA | 1897 | 38201 | rIL13RA1: 1202U21 sense siNA | B ccAGAAuGAuGAuAcccuGTT B | 2117 |
| | | | | stab07 | | |
| 1203 | ACCAGAAUGAUGAUACCCUGCAC | 1898 | 38202 | rIL13RA1: 1203U21 sense siNA | B cAGAAuGAuGAuAcccuGcTT B | 2118 |
| | | | | stab07 | | |
| 1204 | CCAGAAUGAUGAUACCCUGCACU | 1899 | 38203 | rIL13RA1: 1204U21 sense siNA | B AGAAuGAuGAuAcccuGcATT B | 2119 |
| | | | | stab07 | | |
| 1208 | AAUGAUGAUACCCUGCACUGGAA | 1900 | 38204 | rIL13RA1: 1208U21 sense siNA | B uGAuGAuAcccuGcAcuGGTT B | 2120 |
| | | | | stab07 | | |
| 110 | GCCACAGAAGUUCAGCCACCUGU | 1853 | 38205 | rIL13RA1: 128L21 antisense siNA | AGGuGGcuGAAcuucuGuGTT | 2121 |
| | | | | (110C) stab26 | | |
| 112 | CACAGAAGUUCAGCCACCUGUGA | 1854 | 38206 | rIL13RA1: 130L21 antisense siNA | ACAGGuGGcuGAAcuucuGTT | 2122 |
| | | | | (112C) stab26 | | |
| 113 | ACAGAAGUUCAGCCACCUGUGAC | 1855 | 38207 | rIL13RA1: 131L21 antisense siNA | CACAGGuGGcuGAAcuucuTT | 2123 |
| | | | | (113C) stab26 | | |
| 123 | AGCCACCUGUGACGAAUUUGAGU | 1856 | 38208 | rIL13RA1: 141L21 antisense siNA | UCAAAuucGucAcAGGuGGTT | 2124 |
| | | | | (123C) stab26 | | |
| 148 | CUCUGUCGAAAAUCUCUGCACAA | 1857 | 38209 | rIL13RA1: 166L21 antisense siNA | GUGcAGAGAuuuucGAcAGTT | 2125 |
| | | | | (148C) stab26 | | |
| 343 | UGAAAGUGAGAAGCCUAGCCCUU | 1858 | 38210 | rIL13RA1: 361L21 antisense siNA | GGGcuAGGcuucucAcuuuTT | 2126 |
| | | | | (343C) stab26 | | |
| 347 | AGUGAGAAGCCUAGCCCUUUGGU | 1859 | 38211 | rIL13RA1: 366L21 antisense siNA | CAAAGGGcuAGGcuucucATT | 2127 |
| | | | | (347C) stab26 | | |
| 350 | GAGAAGCCUAGCCCUUUGGUGAA | 1860 | 38212 | rIL13RA1: 368L21 antisense siNA | CACcAAAGGGcuAGGcuucTT | 2128 |
| | | | | (350C) stab26 | | |
| 356 | CCUAGCCCUUUGGUGAAAAAGUG | 1861 | 38213 | rIL13RA1: 374L21 antisense siNA | CUUuuucAccAAAGGGcuATT | 2129 |
| | | | | (356C) stab26 | | |
| 362 | CCUUUGGUGAAAAAGUGCAUCUC | 1862 | 38214 | rIL13RA1: 380L21 antisense siNA | GAUGcAcuuuuucAccAAATT | 2130 |
| | | | | (362C) stab26 | | |
| 363 | CUUUGGUGAAAAAGUGCAUCUCA | 1863 | 38215 | rIL13RA1: 381L21 antisense siNA | AGAuGcAcuuuuucAccAATT | 2131 |
| | | | | (363C) stab26 | | |
| 365 | UUGGUGAAAAAGUGCAUCUCACC | 1864 | 38216 | rIL13RA1: 383L21 antisense siNA | UGAGAuGcAcuuuuucAccTT | 2132 |
| | | | | (365C) stab26 | | |
| 419 | GAACUGCAGUGCACUUGGCACAA | 1865 | 38217 | rIL13RA1: 437L21 antisense siNA | GUGccAAGuGcAcuGcAGuTT | 2133 |
| | | | | (419C) stab26 | | |
| 424 | GCAGUGCACUUGGCACAACCUGA | 1866 | 38218 | rIL13RA1: 442L21 antisense siNA | AGGuuGuGccAAGuGcAcuTT | 2134 |
| | | | | (424C) stab26 | | |
| 464 | UGGCUCCCUGGAAAGAAUACAAG | 1867 | 38219 | rIL13RA1: 482L21 antisense siNA | UGUAuucuuuccAGGGAGcTT | 2135 |
| | | | | (464C) stab26 | | |
| 529 | GGGGAAAAGUCUUCAAUGUGAAA | 1868 | 38220 | rIL13RA1: 547L21 antisense siNA | UCAcAuuGAAGAcuuuuccTT | 2136 |
| | | | | (529C) stab26 | | |
| 585 | CCUUUAAAUUGACUAAAGUGGAA | 1869 | 38221 | rIL13RA1: 603L21 antisense siNA | CCAcuuuAGucAAuuuAAATT | 2137 |
| | | | | (585C) stab26 | | |
| 636 | UAAUGGUCAAGGAUAAUGCUGGG | 1870 | 38222 | rIL13RA1: 654L21 antisense siNA | CAGcAuuAuccuuGAccAuTT | 2138 |
| | | | | (636C) stab26 | | |
| 637 | AAUGGUCAAGGAUAAUGCUGGGA | 1871 | 38223 | rIL13RA1: 655L21 antisense siNA | CCAGcAuuAuccuuGAccATT | 2139 |
| | | | | (637C) stab26 | | |
| 638 | AUGGUCAAGGAUAAUGCUGGGAA | 1872 | 38224 | rIL13RA1: 656L21 antisense siNA | CCCAGcAuuAuccuuGAccTT | 2140 |
| | | | | (638C) stab26 | | |
| 640 | GGUCAAGGAUAAUGCUGGGAAAA | 1873 | 38225 | rIL13RA1: 658L21 antisense siNA | UUCccAGcAuuAuccuuGATT | 2141 |
| | | | | (640C) stab26 | | |
| 646 | GGAUAAUGCUGGGAAAAUUAGGC | 1874 | 38226 | rIL13RA1: 664L21 antisense siNA | CUAAuuuucccAGcAuuAuTT | 2142 |
| | | | | (646C) stab26 | | |
| 649 | UAAUGCUGGGAAAAUUAGGCCAU | 1875 | 38227 | rIL13RA1: 667L21 antisense siNA | GGCcuAAuuuucccAGcAuTT | 2143 |
| | | | | (649C) stab26 | | |
| 650 | AAUGCUGGGAAAAUUAGGCCAUC | 1876 | 38228 | rIL13RA1: 668L21 antisense siNA | UGGccuAAuuuucccAGcATT | 2144 |
| | | | | (650C) stab26 | | |
| 654 | CUGGGAAAAUUAGGCCAUCCUAC | 1877 | 38229 | rIL13RA1: 672L21 antisense siNA | AGGAuGGccuAAuuuucccTT | 2145 |
| | | | | (654C) stab26 | | |
| 733 | UUUCCUCAAAAAUGGUGCCUUAU | 1878 | 38230 | rIL13RA1: 751L21 antisense siNA | AAGGcAccAuuuuuGAGGATT | 2146 |
| | | | | (733C) stab26 | | |
| 734 | UUCCUCAAAAAUGGUGCCUUAUU | 1879 | 38231 | rIL13RA1: 752L21 antisense siNA | UAAGGcAccAuuuuuGAGGTT | 2147 |
| | | | | (734C) stab26 | | |
| 856 | AGAGGUUGAAGAGGACAAAUGCC | 1880 | 38232 | rIL13RA1: 874L21 antisense siNA | CAUuuGuccucuucAAccuTT | 2148 |
| | | | | (856C) stab26 | | |
| 863 | GAAGAGGACAAAUGCCAGAAUUC | 1881 | 38233 | rIL13RA1: 881L21 antisense siNA | AUUcuGGcAuuuGuccucuTT | 2149 |
| | | | | (863C) stab26 | | |
| 876 | GCCAGAAUUCUGAAUUUGAUAGA | 1882 | 38234 | rIL13RA1: 894L21 antisense siNA | UAUcAAAuucAGAAuucuGTT | 2150 |
| | | | | (876C) stab26 | | |
| 877 | CCAGAAUUCUGAAUUUGAUAGAA | 1883 | 38235 | rIL13RA1: 895L21 antisense siNA | CUAucAAAuucAGAAuucuTT | 2151 |
| | | | | (877C) stab26 | | |
| 890 | UUUGAUAGAAACAUGGAGGGUGC | 1884 | 38236 | rIL13RA1: 908L21 antisense siNA | ACCcuccAuGuuucuAucATT | 2152 |
| | | | | (890C) stab26 | | |
| 1008 | UGUGGAGUAAUUGGAGCGAAGCG | 1885 | 38237 | rIL13RA1: 1026L21 antisense siNA | CUUcGcuccAAuuAcuccATT | 2153 |
| | | | | (1008C) stab26 | | |
| 1009 | GUGGAGUAAUUGGAGCGAAGCGC | 1886 | 38238 | rIL13RA1: 1027L21 antisense siNA | GCUucGcuccAAuuAcuccTT | 2154 |
| | | | | (1009C) stab26 | | |
| 1010 | UGGAGUAAUUGGAGCGAAGCGCU | 1887 | 38239 | rIL13RA1: 1028L21 antisense siNA | CGCuucGcuccAAuuAcucTT | 2155 |
| | | | | (1010C) stab26 | | |
| 1137 | GGCUUAAGAUCAUUAUAUUUCCU | 1888 | 38240 | rIL13RA1: 1155L21 antisense siNA | GAAAuAuAAuGAucuuAAGTT | 2156 |
| | | | | (1137C) stab26 | | |
| 1153 | AUUUCCUCCAAUUCCUGAUCCUG | 1889 | 38241 | rIL13RA1: 1171L21 antisense siNA | GGAucAGGAAuuGGAGGAATT | 2157 |
| | | | | (1153C) stab26 | | |
| 1161 | CAAUUCCUGAUCCUGGCAAGAUU | 1890 | 38242 | rIL13RA1: 1179L21 antisense siNA | UCUuGccAGGAucAGGAAuTT | 2158 |
| | | | | (1161C) stab26 | | |
| 1163 | AUUCCUGAUCCUGGCAAGAUUUU | 1891 | 38243 | rIL13RA1: 1181L21 antisense siNA | AAUcuuGccAGGAucAGGATT | 2159 |
| | | | | (1163C) stab26 | | |
| 1164 | UUCCUGAUCCUGGCAAGAUUUUU | 1892 | 38244 | rIL13RA1: 1182L21 antisense siNA | AAAucuuGccAGGAucAGGTT | 2160 |
| | | | | (1164C) stab26 | | |
| 1172 | CCUGGCAAGAUUUUUAAAGAAAU | 1893 | 38245 | rIL13RA1: 1190L21 antisense siNA | UUCuuuAAAAAucuuGccATT | 2161 |
| | | | | (1172C) stab26 | | |
| 1182 | UUUUUAAAGAAAUGUUUGGAGAC | 1894 | 38246 | rIL13RA1: 1200L21 antisense siNA | CUCcAAAcAuuucuuuAAATT | 2162 |
| | | | | (1182C) stab26 | | |
| 1198 | UGGAGACCAGAAUGAUGAUACCC | 1895 | 38247 | rIL13RA1: 1216L21 antisense siNA | GUAucAucAuucuGGucucTT | 2163 |
| | | | | (1198C) stab26 | | |
| 1199 | GGAGACCAGAAUGAUGAUACCCU | 1896 | 38248 | rIL13RA1: 1217L21 antisense siNA | GGUAucAucAuucuGGucuTT | 2164 |
| | | | | (1199C) stab26 | | |
| 1202 | GACCAGAAUGAUGAUACCCUGCA | 1897 | 38249 | rIL13RA1: 1220L21 antisense siNA | CAGGGuAucAucAuucuGGTT | 2165 |
| | | | | (1202C) stab26 | | |
| 1203 | ACCAGAAUGAUGAUACCCUGCAC | 1898 | 38250 | rIL13RA1: 1221L21 antisense siNA | GCAGGGuAucAucAuucuGTT | 2166 |
| | | | | (1203C) stab26 | | |
| 1204 | CCAGAAUGAUGAUACCCUGCACU | 1899 | 38251 | rIL13RA1: 1222L21 antisense siNA | UGCAGGGuAucAucAuucuTT | 2167 |
| | | | | (1204C) stab26 | | |
| 1208 | AAUGAUGAUACCCUGCACUGGAA | 1900 | 38252 | rIL13RA1: 1226L21 antisense siNA | CCAGuGcAGGGuAucAucATT | 2168 |
| | | | | (1208C) stab26 | | |
| 1163 | AUUCCUGAUCCUGGCAAGAUUUU | 1891 | 39545 | rIL13RA1: 1163U21 sense siNA | UCCUGAUCCUGGCAAGAUUTT | 2169 |
| | | | | stab00 | | |
| 1163 | AUUCCUGAUCCUGGCAAGAUUUU | 1891 | 39546 | rIL13RA1: 1181L21 antisense | AAUCUUGCCAGGAUCAGGATT | 2170 |
| | | | | siNA (1163C) stab00 | | |
| 21 | AGAGAGCUAUUGAUGGGUCUCAG | 1901 | 37805 | rIL4: 21U21 sense siNA stab07 | B AGAGcuAuuGAuGGGucucTT B | 2171 |
| 22 | GAGAGCUAUUGAUGGGUCUCAGC | 1902 | 37806 | rIL4: 22U21 sense siNA stab07 | B GAGcuAuuGAuGGGucucATT B | 2172 |
| 69 | UGCUUUCUCAUAUGUACCGGGAA | 1903 | 37807 | rIL4: 69U21 sense siNA stab07 | B cuuucucAuAuGuAccGGGTT B | 2173 |
| 75 | CUCAUAUGUACCGGGAACGGUAU | 1904 | 37808 | rIL4: 75U21 sense siNA stab07 | B cAuAuGuAccGGGAAcGGuTT B | 2174 |
| 94 | GUAUCCACGGAUGUAACGACAGC | 1905 | 37809 | rIL4: 94U21 sense siNA stab07 | B AuccAcGGAuGuAAcGAcATT B | 2175 |
| 103 | GAUGUAACGACAGCCCUCUGAGA | 1906 | 37810 | rIL4: 103U21 sense siNA stab07 | B uGuAAcGAcAGcccucuGATT B | 2176 |
| 108 | AACGACAGCCCUCUGAGAGAGAU | 1907 | 37811 | rIL4: 108U21 sense siNA stab07 | B cGAcAGcccucuGAGAGAGTT B | 2177 |
| 144 | AACCAGGUCACAGAAAAAGGGAC | 1908 | 37812 | rIL4: 144U21 sense siNA stab07 | B ccAGGucAcAGAAAAAGGGTT B | 2178 |
| 146 | CCAGGUCACAGAAAAAGGGACUC | 1909 | 37813 | rIL4: 146U21 sense siNA stab07 | B AGGucAcAGAAAAAGGGAcTT B | 2179 |
| 148 | AGGUCACAGAAAAAGGGACUCCA | 1910 | 37814 | rIL4: 148U21 sense siNA stab07 | B GucAcAGAAAAAGGGAcucTT B | 2180 |
| 160 | AAGGGACUCCAUGCACCGAGAUG | 1911 | 37815 | rIL4: 160U21 sense siNA stab07 | B GGGAcuccAuGcAccGAGATT B | 2181 |
| 175 | CCGAGAUGUUUGUACCAGACGUC | 1912 | 37816 | rIL4: 175U21 sense siNA stab07 | B GAGAuGuuuGuAccAGAcGTT B | 2182 |
| 176 | CGAGAUGUUUGUACCAGACGUCC | 1913 | 37817 | rIL4: 176U21 sense siNA stab07 | B AGAuGuuuGuAccAGAcGuTT B | 2183 |
| 190 | CAGACGUCCUUACGGCAACAAGG | 1914 | 37818 | rIL4: 190U21 sense siNA stab07 | B GAcGuccuuAcGGcAAcAATT B | 2184 |
| 226 | ACGAGCUCAUCUGCAGGGCUUCC | 1915 | 37819 | rIL4: 228U21 sense siNA stab07 | B GAGcucAucuGcAGGGcuuTT B | 2185 |
| 234 | AUCUGCAGGGCUUCCAGGGUGCU | 1916 | 37820 | rIL4: 234U21 sense siNA stab07 | B cuGcAGGGcuuccAGGGuGTT B | 2186 |
| 259 | GCAAAUUUUACUUCCCACGUGAU | 1917 | 37821 | rIL4: 259U21 sense siNA stab07 | B AAAuuuuAcuucccAcGuGTT B | 2187 |
| 271 | UCCCACGUGAUGUACCUCCGUGC | 1918 | 37822 | rIL4: 271U21 sense siNA stab07 | B ccAcGuGAuGuAccuccGuTT B | 2188 |
| 272 | CCCACGUGAUGUACCUCCGUGCU | 1919 | 37823 | rIL4: 272U21 sense siNA stab07 | B cAcGuGAuGuAccuccGuGTT B | 2189 |
| 283 | UACCUCCGUGCUUGAAGAACAAG | 1920 | 37824 | rIL4: 283U21 sense siNA stab07 | B ccuccGuGcuuGAAGAAcATT B | 2190 |
| 379 | UGAAUGAGUCCACGCUCACAACA | 1921 | 37825 | rIL4: 379U21 sense siNA stab07 | B AAuGAGuccAcGcucAcAATT B | 2191 |
| 398 | AACACUGAAAGACUUCCUGGAAA | 1922 | 37826 | rIL4: 398U21 sense siNA stab07 | B cAcuGAAAGAcuuccuGGATT B | 2192 |
| 399 | ACACUGAAAGACUUCCUGGAAAG | 1923 | 37827 | rIL4: 399U21 sense siNA stab07 | B AcuGAAAGAcuuccuGGAATT B | 2193 |
| 400 | CACUGAAAGACUUCCUGGAAAGC | 1924 | 37828 | rIL4: 400U21 sense siNA stab07 | B cuGAAAGAcuuccuGGAAATT B | 2194 |
| 401 | ACUGAAAGACUUCCUGGAAAGCC | 1925 | 37829 | rIL4: 401U21 sense siNA stab07 | B uGAAAGAcuuccuGGAAAGTT B | 2195 |
| 402 | CUGAAAGACUUCCUGGAAAGCCU | 1926 | 37830 | rIL4: 402U21 sense siNA stab07 | B GAAAGAcuuccuGGAAAGcTT B | 2196 |
| 403 | UGAAAGACUUCCUGGAAAGCCUA | 1927 | 37831 | rIL4: 403U21 sense siNA stab07 | B AAAGAcuuccuGGAAAGccTT B | 2197 |
| 404 | GAAAGACUUCCUGGAAAGCCUAA | 1928 | 37832 | rIL4: 404U21 sense siNA stab07 | B AAGAcuuccuGGAAAGccuTT B | 2198 |
| 405 | AAAGACUUCCUGGAAAGCCUAAA | 1929 | 37833 | rIL4: 405U21 sense siNA stab07 | B AGAcuuccuGGAAAGccuATT B | 2199 |
| 406 | AAGACUUCCUGGAAAGCCUAAAA | 1930 | 37834 | rIL4: 406U21 sense siNA stab07 | B GAcuuccuGGAAAGccuAATT B | 2200 |
| 407 | AGACUUCCUGGAAAGCCUAAAAA | 1931 | 37835 | rIL4: 407U21 sense siNA stab07 | B AcuuccuGGAAAGccuAAATT B | 2201 |
| 422 | CCUAAAAAGCAUCCUACGAGGGA | 1932 | 37836 | rIL4: 422U21 sense siNA stab07 | B uAAAAAGcAuccuAcGAGGTT B | 2202 |
| 21 | AGAGAGCUAUUGAUGGGUCUCAG | 1901 | 37837 | rIL4: 39L21 antisense siNA | GAGAcccAucAAuAGcucuTT | 2203 |
| | | | | (21C) stab26 | | |
| 22 | GAGAGCUAUUGAUGGGUCUCAGC | 1902 | 37838 | rIL4: 40L21 antisense siNA | UGAGAcccAucAAuAGcucTT | 2204 |
| | | | | (22C) stab26 | | |
| 69 | UGCUUUCUCAUAUGUACCGGGAA | 1903 | 37839 | rIL4: 87L21 antisense siNA | CCCGGuAcAuAuGAGAAAGTT | 2205 |
| | | | | (69C) stab26 | | |
| 75 | CUCAUAUGUACCGGGAACGGUAU | 1904 | 37840 | rIL4: 93L21 antisense siNA | ACCGuucccGGuAcAuAuGTT | 2206 |
| | | | | (75C) stab26 | | |
| 94 | GUAUCCACGGAUGUAACGACAGC | 1905 | 37841 | rIL4: 112L21 antisense siNA | UGUcGuuAcAuccGuGGAuTT | 2207 |
| | | | | (94C) stab26 | | |
| 103 | GAUGUAACGACAGCCCUCUGAGA | 1906 | 37842 | rIL4: 121L21 antisense siNA | UCAGAGGGcuGucGuuAcATT | 2208 |
| | | | | (103C) stab26 | | |
| 108 | AACGACAGCCCUCUGAGAGAGAU | 1907 | 37843 | rIL4: 126L21 antisense siNA | CUCucucAGAGGGcuGucGTT | 2209 |
| | | | | (108C) stab26 | | |
| 144 | AACCAGGUCACAGAAAAAGGGAC | 1908 | 37844 | rIL4: 162L21 antisense siNA | CCCuuuuucuGuGAccuGGTT | 2210 |
| | | | | (144C) stab26 | | |
| 146 | CCAGGUCACAGAAAAAGGGACUC | 1909 | 37845 | rIL4: 164L21 antisense siNA | GUCccuuuuucuGuGAccuTT | 2211 |
| | | | | (146C) stab26 | | |
| 148 | AGGUCACAGAAAAAGGGACUCCA | 1910 | 37846 | rIL4: 166L21 antisense siNA | GAGucccuuuuucuGuGAcTT | 2212 |
| | | | | (148C) stab26 | | |
| 160 | AAGGGACUCCAUGCACCGAGAUG | 1911 | 37847 | rIL4: 178L21 antisense siNA | UCUcGGuGcAuGGAGucccTT | 2213 |
| | | | | (160C) stab26 | | |
| 175 | CCGAGAUGUUUGUACCAGACGUC | 1912 | 37848 | rIL4: 193L21 antisense siNA | CGUcuGGuAcAAAcAucucTT | 2214 |
| | | | | (175C) stab26 | | |
| 176 | CGAGAUGUUUGUACCAGACGUCC | 1913 | 37849 | rIL4: 194L21 antisense siNA | ACGucuGGuAcAAAcAucuTT | 2215 |
| | | | | (176C) stab26 | | |
| 190 | CAGACGUCCUUACGGCAACAAGG | 1914 | 37850 | rIL4: 208L21 antisense siNA | UUGuuGccGuAAGGAcGucTT | 2216 |
| | | | | (190C) stab26 | | |
| 226 | ACGAGCUCAUCUGCAGGGCUUCC | 1915 | 37851 | rIL4: 244L21 antisense siNA | AAGcccuGcAGAuGAGcucTT | 2217 |
| | | | | (226C) stab26 | | |
| 234 | AUCUGCAGGGCUUCCAGGGUGCU | 1916 | 37852 | rIL4: 252L21 antisense siNA | CACccuGGAAGcccuGcAGTT | 2218 |
| | | | | (234C) stab26 | | |
| 259 | GCAAAUUUUACUUCCCACGUGAU | 1917 | 37853 | rIL4: 277L21 antisense siNA | CACGuGGGAAGuAAAAuuuTT | 2219 |
| | | | | (259C) stab26 | | |
| 271 | UCCCACGUGAUGUACCUCCGUGC | 1918 | 37854 | rIL4: 289L21 antisense siNA | ACGGAGGuAcAucAcGuGGTT | 2220 |
| | | | | (271C) stab26 | | |
| 272 | CCCACGUGAUGUACCUCCGUGCU | 1919 | 37855 | rIL4: 290L21 antisense siNA | CACGGAGGuAcAucAcGuGTT | 2221 |
| | | | | (272C) stab26 | | |
| 283 | UACCUCCGUGCUUGAAGAACAAG | 1920 | 37856 | rIL4: 301L21 antisense siNA | UGUucuucAAGcAcGGAGGTT | 2222 |
| | | | | (283C) stab26 | | |
| 379 | UGAAUGAGUCCACGCUCACAACA | 1921 | 37857 | rIL4: 397L21 antisense siNA | UUGuGAGcGuGGAcucAuuTT | 2223 |
| | | | | (379C) stab26 | | |
| 398 | AACACUGAAAGACUUCCUGGAAA | 1922 | 37858 | rIL4: 416L21 antisense siNA | UCCAGGAAGucuuucAGuGTT | 2224 |
| | | | | (398C) stab26 | | |
| 399 | ACACUGAAAGACUUCCUGGAAAG | 1923 | 37859 | rIL4: 417L21 antisense siNA | UUCcAGGAAGucuuucAGuTT | 2225 |
| | | | | (399C) stab26 | | |
| 400 | CAGUGAAAGACUUCCUGGAAAGC | 1924 | 37860 | rIL4: 418L21 antisense siNA | UUUccAGGAAGucuuucAGTT | 2226 |
| | | | | (400C) stab26 | | |
| 401 | ACUGAAAGACUUCCUGGAAAGCC | 1925 | 37861 | rIL4: 419L21 antisense siNA | CUUuccAGGAAGucuuucATT | 2227 |
| | | | | (401C) stab26 | | |
| 402 | CUGAAAGACUUCCUGGAAAGCCU | 1926 | 37862 | rIL4: 420L21 antisense siNA | GCUuuccAGGAAGucuuucTT | 2228 |
| | | | | (402C) stab26 | | |
| 403 | UGAAAGACUUCCUGGAAAGCCUA | 1927 | 37863 | rIL4: 421L21 antisense siNA | GGCuuuccAGGAAGucuuuTT | 2229 |
| | | | | (403C) stab26 | | |
| 404 | GAAAGACUUCCUGGAAAGCCUAA | 1928 | 37864 | rIL4: 422L21 antisense siNA | AGGcuuuccAGGAAGucuuTT | 2230 |
| | | | | (404C) stab26 | | |
| 405 | AAAGACUUCCUGGAAAGCCUAAA | 1929 | 37865 | rIL4: 423L21 antisense siNA | UAGGcuuuccAGGAAGucuTT | 2231 |
| | | | | (405C) stab26 | | |
| 406 | AAGACUUCCUGGAAAGCCUAAAA | 1930 | 37866 | rIL4: 424L21 antisense siNA | UUAGGcuuuccAGGAAGucTT | 2232 |
| | | | | (406C) stab26 | | |
| 407 | AGACUUCCUGGAAAGCCUAAAAA | 1931 | 37867 | rIL4: 425L21 antisense siNA | UUUAGGcuuuccAGGAAGuTT | 2233 |
| | | | | (407C) stab26 | | |
| 422 | CCUAAAAAGCAUCCUACGAGGGA | 1932 | 37868 | rIL4: 440L21 antisense siNA | CCUcGuAGGAuGcuuuuuATT | 2234 |
| | | | | (422C) stab26 | | |
| 400 | CACUGAAAGACUUCCUGGAAAGC | 1924 | 39523 | rIL4: 400U21 sense siNA stab00 | CUGAAAGACUUCCUGGAAATT | 2235 |
| 400 | CACUGAAAGACUUCCUGGAAAGC | 1924 | 39524 | rIL4: 418L21 antisense siNA | UUUCCAGGAAGUCUUUCAGTT | 2236 |
| | | | | (400C) stab00 | | |
| 22 | GAGAGCUAUUGAUGGGUCUCAGC | 1902 | 39533 | rIL4: 22U21 sense siNA stab00 | GAGCUAUUGAUGGGUCUCATT | 2237 |
| 404 | GAAAGACUUCCUGGAAAGCCUAA | 1928 | 39534 | rIL4: 404U21 sense siNA stab00 | AAGACUUCCUGGAAAGCCUTT | 2238 |
| 405 | AAAGACUUCCUGGAAAGCCUAAA | 1929 | 39535 | rIL4: 405U21 sense siNA stab00 | AGACUUCCUGGAAAGCCUATT | 2239 |
| 22 | GAGAGCUAUUGAUGGGUCUCAGC | 1902 | 39536 | rIL4: 40L21 antisense siNA | UGAGACCCAUCAAUAGCUCTT | 2240 |
| | | | | (22C) stab00 | | |
| 404 | GAAAGACUUCCUGGAAAGCCUAA | 1928 | 39537 | rIL4: 422L21 antisense siNA | AGGCUUUCCAGGAAGUCUUTT | 2241 |
| | | | | (404C) stab00 | | |
| 405 | AAAGACUUCCUGGAAAGCCUAAA | 1929 | 39538 | rIL4: 423L21 antisense siNA | UAGGCUUUCCAGGAAGUCUTT | 2242 |
| | | | | (405C) stab00 | | |
| 272 | ACCCCACCUGCUUCUCUGACUAC | 1933 | 37869 | rIL4R: 272U21 sense siNA stab07 | B cccAccuGcuucucuGAcuTT B | 2243 |
| 274 | CCCACCUGCUUCUCUGACUACAU | 1934 | 37870 | rIL4R: 274U21 sense siNA stab07 | B cAccuGcuucucuGAcuAcTT B | 2244 |
| 277 | ACCUGCUUCUCUGACUACAUCCG | 1935 | 37871 | rIL4R: 277U21 sense siNA stab07 | B cuGcuucucuGAcuAcAucTT B | 2245 |
| 278 | CCUGCUUCUCUGACUACAUCCGC | 1936 | 37872 | rIL4R: 278U21 sense siNA stab07 | B uGcuucucuGAcuAcAuccTT B | 2246 |
| 279 | CUGCUUCUCUGACUACAUCCGCA | 1937 | 37873 | rIL4R: 279U21 sense siNA stab07 | B GcuucucuGAcuAcAuccGTT B | 2247 |
| 280 | UGCUUCUCUGACUACAUCCGCAC | 1938 | 37874 | rIL4R: 280U21 sense siNA stab07 | B cuucucuGAcuAcAuccGcTT B | 2248 |
| 281 | GCUUCUCUGACUACAUCCGCACU | 1939 | 37875 | rIL4R: 281U21 sense siNA stab07 | B uucucuGAcuAcAuccGcATT B | 2249 |
| 383 | UCUCUGAAAACCUCACAUGCACC | 1940 | 37876 | rIL4R: 383U21 sense siNA stab07 | B ucuGAAAAccucAcAuGcATT B | 2250 |
| 554 | CUCCAGACAACCUCACACUCCAC | 1941 | 37877 | rIL4R: 554U21 sense siNA stab07 | B ccAGAcAAccucAcAcuccTT B | 2251 |
| 556 | CCAGACAACCUCACACUCCACAC | 1942 | 37878 | rIL4R: 556U21 sense siNA stab07 | B AGAcAAccucAcAcuccAcTT B | 2252 |
| 557 | CAGACAACCUCACACUCCACACC | 1943 | 37879 | rIL4R: 557U21 sense siNA stab07 | B GAcAAccucAcAcuccAcATT B | 2253 |
| 560 | ACAACCUCACACUCCACACCAAU | 1944 | 37880 | rIL4R: 560U21 sense siNA stab07 | B AAccucAcAcuccAcAccATT B | 2254 |
| 561 | CAACCUCACACUCCACACCAAUG | 1945 | 37881 | rIL4R: 561U21 sense siNA stab07 | B AccucAcAcuccAcAccAATT B | 2255 |
| 562 | AACCUCACACUCCACACCAAUGU | 1946 | 37882 | rIL4R: 562U21 sense siNA stab07 | B ccucAcAcuccAcAccAAuTT B | 2256 |
| 563 | ACCUCACACUCCACACCAAUGUC | 1947 | 37883 | rIL4R: 563U21 sense siNA stab07 | B cucAcAcuccAcAccAAuGTT B | 2257 |
| 564 | CCUCACACUCCACACCAAUGUCU | 1948 | 37884 | rIL4R: 564U21 sense siNA stab07 | B ucAcAcuccAcAccAAuGuTT B | 2258 |
| 659 | UGGUCAACAUCUCCAGAGAGGAC | 1949 | 37885 | rIL4R: 659U21 sense siNA stab07 | B GucAAcAucuccAGAGAGGTT B | 2259 |
| 660 | GGUCAACAUCUCCAGAGAGGACA | 1950 | 37886 | rIL4R: 660U21 sense siNA stab07 | B ucAAcAucuccAGAGAGGATT B | 2260 |
| 663 | CAACAUCUCCAGAGAGGACAACC | 1951 | 37887 | rIL4R: 663U21 sense siNA stab07 | B AcAucuccAGAGAGGAcAATT B | 2261 |
| 664 | AACAUCUCCAGAGAGGACAACCC | 1952 | 37888 | rIL4R: 664U21 sense siNA stab07 | B cAucuccAGAGAGGAcAAcTT B | 2262 |
| 821 | AGUGGAGUCCCAGCAUCACGUGG | 1953 | 37889 | rIL4R: 821U21 sense siNA stab07 | B uGGAGucccAGcAucAcGuTT B | 2263 |
| 832 | AGCAUCACGUGGUACAACCCAAA | 1954 | 37890 | rIL4R: 832U21 sense siNA stab07 | B cAucAcGuGGuAcAAcccATT B | 2264 |
| 1033 | AAGAUAUGGUGGGACCAGAUUCC | 1955 | 37891 | rIL4R: 1033U21 sense siNA | B GAuAuGGuGGGAccAGAuuTT B | 2265 |
| | | | | stab07 | | |
| 1304 | UCCUCUGGCCAGAGAACGUUCAU | 1956 | 37892 | rIL4R: 1304U21 sense siNA | B cucuGGccAGAGAAcGuucTT B | 2266 |
| | | | | stab07 | | |
| 1305 | CCUCUGGCCAGAGAACGUUCAUG | 1957 | 37893 | rIL4R: 1305U21 sense siNA | B ucuGGccAGAGAAcGuucATT B | 2267 |
| | | | | stab07 | | |
| 1363 | CCAGUACAGAAUGUGGAGGAGGA | 1958 | 37894 | rIL4R: 1363U21 sense siNA | B AGuAcAGAAuGuGGAGGAGTT B | 2268 |
| | | | | stab07 | | |
| 1368 | ACAGAAUGUGGAGGAGGAAGAGG | 1959 | 37895 | rIL4R: 1368U21 sense siNA | B AGAAuGuGGAGGAGGAAGATT B | 2269 |
| | | | | stab07 | | |
| 1410 | CCUGAGCAUGUCACCUGAGAACA | 1960 | 37896 | rIL4R: 1410U21 sense siNA | B uGAGcAuGucAccuGAGAATT B | 2270 |
| | | | | stab07 | | |
| 1503 | GCUGGGGGCUGAGAAUGGAGGCG | 1961 | 37897 | rIL4R: 1503U21 sense siNA | B uGGGGGcuGAGAAuGGAGGTT B | 2271 |
| | | | | stab07 | | |
| 1719 | CAAUCCUGCCUACCGGAGUUUUA | 1962 | 37898 | rIL4R: 1719U21 sense siNA | B AuccuGccuAccGGAGuuuTT B | 2272 |
| | | | | stab07 | | |
| 1720 | AAUCCUGCCUACCGGAGUUUUAG | 1963 | 37899 | rIL4R: 1720U21 sense siNA | B uccuGccuAccGGAGuuuuTT B | 2273 |
| | | | | stab07 | | |
| 1721 | AUCCUGCCUACCGGAGUUUUAGU | 1964 | 37900 | rIL4R: 1721U21 sense siNA | B ccuGccuAccGGAGuuuuATT B | 2274 |
| | | | | stab07 | | |
| 1722 | UCCUGCCUACCGGAGUUUUAGUG | 1965 | 37901 | rIL4R: 1722U21 sense siNA | B cuGccuAccGGAGuuuuAGTT B | 2275 |
| | | | | stab07 | | |
| 1723 | CCUGCCUACCGGAGUUUUAGUGA | 1966 | 37902 | rIL4R: 1723U21 sense siNA | B uGccuAccGGAGuuuuAGuTT B | 2276 |
| | | | | stab07 | | |
| 1880 | GGGAGCAGAUCCUUCACAUGAGU | 1967 | 37903 | rIL4R: 1880U21 sense siNA | B GAGcAGAuccuucAcAuGATT B | 2277 |
| | | | | stab07 | | |
| 1889 | UCCUUCACAUGAGUGUCCUGCAG | 1968 | 37904 | rIL4R: 1889U21 sense siNA | B cuucAcAuGAGuGuccuGcTT B | 2278 |
| | | | | stab07 | | |
| 1955 | AAGAGUUUGUGCAGGCAGUGAAG | 1969 | 37905 | rIL4R: 1955U21 sense siNA | B GAGuuuGuGcAGGcAGuGATT B | 2279 |
| | | | | stab07 | | |
| 2346 | CAUUGUGUACUCGUCCCUCACCU | 1970 | 37906 | rIL4R: 2346U21 sense siNA | B uuGuGuAcucGucccucAcTT B | 2280 |
| | | | | stab07 | | |
| 2872 | AGGGACUCAUUUUGCUUUCUCCC | 1971 | 37907 | rIL4R: 2872U21 sense siNA | B GGAcucAuuuuGcuuucucTT B | 2281 |
| | | | | stab07 | | |
| 2934 | CUCUUGUUGCCCUACCUGCUCAG | 1972 | 37908 | rIL4R: 2934U21 sense siNA | B cuuGuuGcccuAccuGcucTT B | 2282 |
| | | | | stab07 | | |
| 3024 | UCUCCAGCUGGAAGCUGGUCCUA | 1973 | 37909 | rIL4R: 3024U21 sense siNA | B uccAGcuGGAAGcuGGuccTT B | 2283 |
| | | | | stab07 | | |
| 3220 | AAACUUGAUUGCCCAAAGUCACU | 1974 | 37910 | rIL4R: 3220U21 sense siNA | B AcuuGAuuGcccAAAGucATT B | 2284 |
| | | | | stab07 | | |
| 3221 | AACUUGAUUGCCCAAAGUCACUG | 1975 | 37911 | rIL4R: 3221U21 sense siNA | B cuuGAuuGcccAAAGucAcTT B | 2285 |
| | | | | stab07 | | |
| 3250 | ACCCACAUGUGGCCAGAAGCCAG | 1976 | 37912 | rIL4R: 3250U21 sense siNA | B ccAcAuGuGGccAGAAGccTT B | 2286 |
| | | | | stab07 | | |
| 3290 | AGUGGGAUCCCAGUAAACAAACA | 1977 | 37913 | rIL4R: 3290U21 sense siNA | B uGGGAucccAGuAAAcAAATT B | 2287 |
| | | | | stab07 | | |
| 3425 | GGCAGACUGCAGUCUGACUGCAU | 1978 | 37914 | rIL4R: 3425U21 sense siNA | B cAGAcuGcAGucuGAcuGcTT B | 2288 |
| | | | | stab07 | | |
| 3426 | GCAGACUGCAGUCUGACUGCAUU | 1979 | 37915 | rIL4R: 3426U21 sense siNA | B AGAcuGcAGucuGAcuGcATT B | 2289 |
| | | | | stab07 | | |
| 3427 | CAGACUGCAGUCUGACUGCAUUC | 1980 | 37916 | rIL4R: 3427U21 sense siNA | B GAcuGcAGucuGAcuGcAuTT B | 2290 |
| | | | | stab07 | | |
| 272 | ACCCCACCUGCUUCUCUGACUAC | 1933 | 37917 | rIL4R: 290L21 antisense siNA | AGUcAGAGAAGcAGGuGGGTT | 2291 |
| | | | | (272C) stab26 | | |
| 274 | CCCACCUGCUUCUCUGACUACAU | 1934 | 37918 | rIL4R: 292L21 antisense siNA | GUAGUcAGAGAAGcAGGuGTT | 2292 |
| | | | | (274C) stab26 | | |
| 277 | ACCUGCUUCUCUGACUACAUCCG | 1935 | 37919 | rIL4R: 295L21 antisense siNA | GAUGuAGucAGAGAAGcAGTT | 2293 |
| | | | | (277C) stab26 | | |
| 278 | CCUGCUUCUCUGACUACAUCCGC | 1936 | 37920 | rIL4R: 296L21 antisense siNA | GGAuGuAGucAGAGAAGcATT | 2294 |
| | | | | (278C) stab26 | | |
| 279 | CUGCUUCUCUGACUACAUCCGCA | 1937 | 37921 | rIL4R: 297L21 antisense siNA | CGGAuGuAGucAGAGAAGcTT | 2295 |
| | | | | (279C) stab26 | | |
| 280 | UGCUUCUCUGACUACAUCCGCAC | 1938 | 37922 | rIL4R: 298L21 antisense siNA | GCGGAuGuAGucAGAGAAGTT | 2296 |
| | | | | (280C) stab26 | | |
| 281 | GCUUCUCUGACUACAUCCGCACU | 1939 | 37923 | rIL4R: 299L21 antisense siNA | UGCGGAuGuAGucAGAGAATT | 2297 |
| | | | | (281C) stab26 | | |
| 383 | UCUCUGAAAACCUCACAUGCACC | 1940 | 37924 | rIL4R: 401L21 antisense siNA | UGCAuGuGAGGuuuucAGATT | 2298 |
| | | | | (383C) stab26 | | |
| 554 | CUCCAGACAACCUCACACUCCAC | 1941 | 37925 | rIL4R: 572L21 antisense siNA | GGAGuGuGAGGuuGucuGGTT | 2299 |
| | | | | (554C) stab26 | | |
| 556 | CCAGACAACCUCACACUCCACAC | 1942 | 37926 | rIL4R: 574L21 antisense siNA | GUGGAGuGuGAGGuuGucuTT | 2300 |
| | | | | (556C) stab26 | | |
| 557 | CAGACAACCUCACACUCCACACC | 1943 | 37927 | rIL4R: 575L21 antisense siNA | UGUGGAGuGuGAGGuuGucTT | 2301 |
| | | | | (557C) stab26 | | |
| 560 | ACAACCUCACACUCCACACCAAU | 1944 | 37928 | rIL4R: 578L21 antisense siNA | UGGuGuGGAGuGuGAGGuuTT | 2302 |
| | | | | (560C) stab26 | | |
| 561 | CAACCUCACACUCCACACCAAUG | 1945 | 37929 | rIL4R: 579L21 antisense siNA | UUGGuGuGGAGuGuGAGGuTT | 2303 |
| | | | | (561C) stab26 | | |
| 562 | AACCUCACACUCCACACCAAUGU | 1946 | 37930 | rIL4R: 580L21 antisense siNA | AUUGGuGuGGAGuGuGAGGTT | 2304 |
| | | | | (562C) stab26 | | |
| 563 | ACCUCACACUCCACACCAAUGUC | 1947 | 37931 | rIL4R: 581L21 antisense siNA | CAUuGGuGuGGAGuGuGAGTT | 2305 |
| | | | | (563C) stab26 | | |
| 564 | CCUCACACUCCACACCAAUGUCU | 1948 | 37932 | rIL4R: 582L21 antisense siNA | ACAuuGGuGuGGAGuGuGATT | 2306 |
| | | | | (564C) stab26 | | |
| 659 | UGGUCAACAUCUCCAGAGAGGAC | 1949 | 37933 | rIL4R: 677L21 antisense siNA | CCUcucuGGAGAuGuuGAcTT | 2307 |
| | | | | (659C) stab26 | | |
| 660 | GGUCAACAUCUCCAGAGAGGACA | 1950 | 37934 | rIL4R: 678L21 antisense siNA | UCCucucuGGAGAuGuuGATT | 2308 |
| | | | | (660C) stab26 | | |
| 663 | CAACAUCUCCAGAGAGGACAACC | 1951 | 37935 | rIL4R: 681L21 antisense siNA | UUGuccucucuGGAGAuGuTT | 2309 |
| | | | | (663C) stab26 | | |
| 664 | AACAUCUCCAGAGAGGACAACCC | 1952 | 37936 | rIL4R: 682L21 antisense siNA | GUUGuccucucuGGAGAuGTT | 2310 |
| | | | | (664C) stab26 | | |
| 821 | AGUGGAGUCCCAGCAUCACGUGG | 1953 | 37937 | rIL4R: 839L21 antisense siNA | ACGuGAuGcuGGGAcuccATT | 2311 |
| | | | | (821C) stab26 | | |
| 832 | AGCAUCACGUGGUACAACCCAAA | 1954 | 37938 | rOL4R: 850L21 antisense siNA | UGGGuuGuAccAcGuGAuGTT | 2312 |
| | | | | (832C) stab26 | | |
| 1033 | AAGAUAUGGUGGGACCAGAUUCC | 1955 | 37939 | rIL4R: 1051L21 antisense siNA | AAUcuGGucccAccAuAucTT | 2313 |
| | | | | (1033C) stab26 | | |
| 1304 | UCCUCUGGCCAGAGAACGUUCAU | 1956 | 37940 | rIL4R: 1322L21 antisense siNA | GAAcGuucucuGGccAGAGTT | 2314 |
| | | | | (1304C) stab26 | | |
| 1305 | CCUCUGGCCAGAGAACGUUCAUG | 1957 | 37941 | rIL4R: 1323L21 antisense siNA | UGAAcGuucucuGGccAGATT | 2315 |
| | | | | (1305C) stab26 | | |
| 1363 | CCAGUACAGAAUGUGGAGGAGGA | 1958 | 37942 | rIL4R: 1381L21 antisense siNA | CUCcuccAcAuucuGuAcuTT | 2316 |
| | | | | (1363C) stab26 | | |
| 1368 | ACAGAAUGUGGAGGAGGAAGAGG | 1959 | 37943 | rIL4R: 1386L21 antisense siNA | UCUuccuccuccAcAuucuTT | 2317 |
| | | | | (1368C) stab26 | | |
| 1410 | CCUGAGCAUGUCACCUGAGAACA | 1960 | 37944 | rIL4R: 1428L21 antisense siNA | UUCucAGGuGAcAuGcucATT | 2318 |
| | | | | (1410C) stab26 | | |
| 1503 | GCUGGGGGCUGAGAAUGGAGGCG | 1961 | 37945 | rIL4R: 1521L21 antisense siNA | CCUccAuucucAGcccccATT | 2319 |
| | | | | (1503C) stab26 | | |
| 1719 | CAAUCCUGCCUACCGGAGUUUUA | 1962 | 37946 | rIL4R: 1737L21 antisense siNA | AAAcuccGGuAGGcAGGAuTT | 2320 |
| | | | | (1719C) stab26 | | |
| 1720 | AAUCCUGCCUACCGGAGUUUUAG | 1963 | 37947 | rIL4R: 1738L21 antisense siNA | AAAAcuccGGuAGGcAGGATT | 2321 |
| | | | | (1720C) stab26 | | |
| 1721 | AUCCUGCCUACCGGAGUUUUAGU | 1964 | 37948 | rIL4R: 1739L21 antisense siNA | UAAAAcuccGGuAGGcAGGTT | 2322 |
| | | | | (1721C) stab26 | | |
| 1722 | UCCUGCCUACCGGAGUUUUAGUG | 1965 | 37949 | rIL4R: 1740L21 antisense siNA | CUAAAAcuccGGuAGGcAGTT | 2323 |
| | | | | (1722C) stab26 | | |
| 1723 | CCUGCCUACCGGAGUUUUAGUGA | 1966 | 37950 | rIL4R: 1741L21 antisense siNA | ACUAAAAcuccGGuAGGcATT | 2324 |
| | | | | (1723C) stab26 | | |
| 1880 | GGGAGCAGAUCCUUCACAUGAGU | 1967 | 37951 | rIL4R: 1898L21 antisense siNA | UCAuGuGAAGGAucuGcucTT | 2325 |
| | | | | (1880C) stab26 | | |
| 1889 | UCCUUCACAUGAGUGUCCUGGAG | 1968 | 37952 | rIL4R: 1907L21 antisense siNA | GCAGGAcAcucAuGuGAAGTT | 2326 |
| | | | | (1889C) stab26 | | |
| 1955 | AAGAGUUUGUGCAGGCAGUGAAG | 1969 | 37953 | rIL4R: 1973L21 antisense siNA | UCAcuGccuGcAcAAAcucTT | 2327 |
| | | | | (1955C) stab26 | | |
| 2346 | CAUUGUGUACUCGUCCCUCACCU | 1970 | 37954 | rIL4R: 2364L21 antisense siNA | GUGAGGGAcGAGuAcAcAATT | 2328 |
| | | | | (2346C) stab26 | | |
| 2872 | AGGGACUCAUUUUGCUUUCUCCC | 1971 | 37955 | rIL4R: 2890L21 antisense siNA | GAGAAAGcAAAAuGAGuccTT | 2329 |
| | | | | (2872C) stab26 | | |
| 2934 | CUCUUGUUGCCCUACCUGCUCAG | 1972 | 37956 | rIL4R: 2952L21 antisense siNA | GAGcAGGuAGGGcAAcAAGTT | 2330 |
| | | | | (2934C) stab26 | | |
| 3024 | UCUCCAGCUGGAAGCUGGUCCUA | 1973 | 37957 | rIL4R: 3042L21 antisense siNA | GGAccAGcuuccAGcuGGATT | 2331 |
| | | | | (3024C) stab26 | | |
| 3220 | AAACUUGAUUGCCCAAAGUCACU | 1974 | 37958 | rIL4R: 3238L21 antisense siNA | UGAcuuuGGGcAAucAAGuTT | 2332 |
| | | | | (3220C) stab26 | | |
| 3221 | AACUUGAUUGCCCAAAGUCACUG | 1975 | 37959 | rIL4R: 3239L21 antisense siNA | GUGAcuuuGGGcAAucAAGTT | 2333 |
| | | | | (3221C) stab26 | | |
| 3250 | ACCCACAUGUGGCCAGAAGCCAG | 1976 | 37960 | rIL4R: 3268L21 antisense siNA | GGCuucuGGccAcAuGuGGTT | 2334 |
| | | | | (3250C) stab26 | | |
| 3290 | AGUGGGAUCCCAGUAAACAAACA | 1977 | 37961 | rIL4R: 3308L21 antisense siNA | UUUGuuuAcuGGGAucccATT | 2335 |
| | | | | (3290C) stab26 | | |
| 3425 | GGCAGACUGCAGUCUGACUGCAU | 1978 | 37962 | rIL4R: 3443L21 antisense siNA | GCAGucAGAcuGcAGucuGTT | 2336 |
| | | | | (3425C) stab26 | | |
| 3426 | GCAGACUGCAGUCUGACUGCAUU | 1979 | 37963 | rIL4R: 3444L21 antisense siNA | UGCAGucAGAcuGcAGucuTT | 2337 |
| | | | | (3426C) stab26 | | |
| 3427 | CAGACUGCAGUCUGACUGCAUUC | 1980 | 37964 | rIL4R: 3445L21 antisense siNA | AUGcAGucAGAcuGcAGucTT | 2338 |
| | | | | (3427C) stab26 | | |
| 3220 | AAACUUGAUUGCCCAAAGUCACU | 1974 | 39527 | rIL4R: 3220U21 sensesiNA | ACUUGAUUGCCCAAAGUCATT | 2339 |
| | | | | stab00 | | |
| 3220 | AAACUUGAUUGCCCAAAGUCACU | 1974 | 39528 | rIL4R: 3238L21 antisense siNA | UGACUUUGGGCAAUCAAGUTT | 2340 |
| | | | | (3220C) stab00 | | |

Uppercase = ribonucleotide
u, c = 2′-deoxy2′-fluoro U, C
T = thymidine
B = inverted deoxy abasic
s = phosphorothloate linkage
A = deoxy Adenosine
G = deoxy Guanosine
G = 2′-O-methyl Guanosine
A = 2′-O-methyl Adenosine
h = human
r = rat
m = mouse

TABLE IV
Non-limiting examples of Stabilization Chemistries for
chemically modified siNA constructs

| Chemistry | pyrimidine | Purine | cap | p = S | Strand |
|---|---|---|---|---|---|
| “Stab 00” | Ribo | Ribo | TT at 3′-ends | | S/AS |
| “Stab 1” | Ribo | Ribo | — | 5 at 5′-end | S/AS |
| | | | | 1 at 3′-end | |
| “Stab 2” | Ribo | Ribo | — | All linkages | Usually AS |
| “Stab 3” | 2′-fluoro | Ribo | — | 4 at 5′-end | Usually S |
| | | | | 4 at 3′-end | |
| “Stab 4” | 2′-fluoro | Ribo | 5′ and 3′-ends | — | Usually S |
| “Stab 5” | 2′-fluoro | Ribo | — | 1 at 3′-end | Usually AS |
| “Stab 6” | 2′-O-Methyl | Ribo | 5′ and 3′- | — | Usually S |
| | | | ends | | |
| “Stab 7” | 2′-fluoro | 2′-deoxy | 5′ and 3′- | — | Usually S |
| | | | ends | | |
| “Stab 8” | 2′-fluoro | 2′-O-Methyl | — | 1 at 3′-end | S/AS |
| “Stab 9” | Ribo | Ribo | 5′ and 3′- | — | Usually S |
| | | | ends | | |
| “Stab 10” | Ribo | Ribo | — | 1 at 3′-end | Usually AS |
| “Stab 11” | 2′-fluoro | 2′-deoxy | — | 1 at 3′-end | Usually AS |
| “Stab 12” | 2′-fluoro | LNA | 5′ and 3′- | | Usually S |
| | | | ends | | |
| “Stab 13” | 2′-fluoro | LNA | | 1 at 3′-end | Usually AS |
| “Stab 14” | 2′-fluoro | 2′-deoxy | | 2 at 5′-end | Usually AS |
| | | | | 1 at 3′-end | |
| “Stab 15” | 2′-deoxy | 2′-deoxy | | 2 at 5′-end | Usually AS |
| | | | | 1 at 3′-end | |
| “Stab 16” | Ribo | 2′-O- | 5′ and 3′- | | Usually S |
| | | Methyl | ends | | |
| “Stab 17” | 2′-O-Methyl | 2′-O- | 5′ and 3′- | | Usually S |
| | | Methyl | ends | | |
| “Stab 18” | 2′-fluoro | 2′-O- | 5′ and 3′- | | Usually S |
| | | Methyl | ends | | |
| “Stab 19” | 2′-fluoro | 2′-O- | 3′-end | | S/AS |
| | | Methyl | | | |
| “Stab 20” | 2′-fluoro | 2′-deoxy | 3′-end | | Usually AS |
| “Stab 21” | 2′-fluoro | Ribo | 3′-end | | Usually AS |
| “Stab 22” | Ribo | Ribo | 3′-end | | Usually AS |
| “Stab 23” | 2′-fluoro* | 2′-deoxy* | 5′ and 3′- | | Usually S |
| | | | ends | | |
| “Stab 24” | 2′-fluoro* | 2′-O- | — | 1 at 3′-end | S/AS |
| | | Methyl* | | | |
| “Stab 25” | 2′-fluoro* | 2′-O- | — | 1 at 3′-end | S/AS |
| | | Methyl* | | | |
| “Stab 26” | 2′-fluoro* | 2′-O- | — | | S/AS |
| | | Methyl* | | | |
| “Stab 27” | 2′-fluoro* | 2′-O- | 3′-end | | S/AS |
| | | Methyl* | | | |
| “Stab 28” | 2′-fluoro* | 2′-O- | 3′-end | | S/AS |
| | | Methyl* | | | |
| “Stab 29” | 2′-fluoro* | 2′-O- | | 1 at 3′-end | S/AS |
| | | Methyl* | | | |
| “Stab 30” | 2′-fluoro* | 2′-O- | | | S/AS |
| | | Methyl* | | | |
| “Stab 31” | 2′-fluoro* | 2′-O- | 3′-end | | S/AS |
| | | Methyl* | | | |
| “Stab 32” | 2′-fluoro | 2′-O- | | | S/AS |
| | | Methyl | | | |
| “Stab 33” | 2′-fluoro | 2′-deoxy* | 5′ and 3′- | — | Usually S |
| | | | ends | | |
| “Stab 34” | 2′-fluoro | 2′-O- | 5′ and 3′- | | Usually S |
| | | Methyl* | ends | | |
| “Stab 3F” | 2′-OCF3 | Ribo | — | 4 at 5′-end | Usually S |
| | | | | 4 at 3′-end | |
| “Stab 4F” | 2′-OCF3 | Ribo | 5′ and 3′- | — | Usually S |
| | | | ends | | |
| “Stab 5F” | 2′-OCF3 | Ribo | — | 1 at 3′-end | Usually AS |
| “Stab 7F” | 2′-OCF3 | 2′-deoxy | 5′ and 3′- | — | Usually S |
| | | | ends | | |
| “Stab 8F” | 2′-OCF3 | 2′-O- | — | 1 at 3′-end | S/AS |
| | | Methyl | | | |
| “Stab 11F” | 2′-OCF3 | 2′-deoxy | — | 1 at 3′-end | Usually AS |
| “Stab 12F” | 2′-OCF3 | LNA | 5′ and 3′- | | Usually S |
| | | | ends | | |
| “Stab 13F” | 2′-OCF3 | LNA | | 1 at 3′-end | Usually AS |
| “Stab 14F” | 2′-OCF3 | 2′-deoxy | | 2 at 5′-end | Usually AS |
| | | | | 1 at 3′-end | |
| “Stab 15F” | 2′-OCF3 | 2′-deoxy | | 2 at 5′-end | Usually AS |
| | | | | 1 at 3′-end | |
| “Stab 18F” | 2′-OCF3 | 2′-O- | 5′ and 3′- | | Usually S |
| | | Methyl | ends | | |
| “Stab 19F” | 2′-OCF3 | 2′-O- | 3′-end | | S/AS |
| | | Methyl | | | |
| “Stab 20F” | 2′-OCF3 | 2′-deoxy | 3′-end | | Usually AS |
| “Stab 21F” | 2′-OCF3 | Ribo | 3′-end | | Usually AS |
| “Stab 23F” | 2′-OCF3* | 2′-deoxy* | 5′ and 3′- | | Usually S |
| | | | ends | | |
| “Stab 24F” | 2′-OCF3* | 2′-O- | — | 1 at 3′-end | S/AS |
| | | Methyl* | | | |
| “Stab 25F” | 2′-OCF3* | 2′-O- | — | 1 at 3′-end | S/AS |
| | | Methyl* | | | |
| “Stab 26F” | 2′-OCF3* | 2′-O- | — | | S/AS |
| | | Methyl* | | | |
| “Stab 27F” | 2′-OCF3* | 2′-O- | 3′-end | | S/AS |
| | | Methyl* | | | |
| “Stab 28F” | 2′-OCF3* | 2′-O- | 3′-end | | S/AS |
| | | Methyl* | | | |
| “Stab 29F” | 2′-OCF3* | 2′-O- | | 1 at 3′-end | S/AS |
| | | Methyl* | | | |
| “Stab 30F” | 2′-OCF3* | 2′-O- | | | S/AS |
| | | Methyl* | | | |
| “Stab 31F” | 2′-OCF3* | 2′-O- | 3′-end | | S/AS |
| | | Methyl* | | | |
| “Stab 32F” | 2′-OCF3 | 2′-O- | | | S/AS |
| | | Methyl | | | |
| “Stab 33F” | 2′-OCF3 | 2′-deoxy* | 5′ and 3′- | — | Usually S |
| | | | ends | | |
| “Stab 34F” | 2′-OCF3 | 2′-O- | 5′ and 3′- | | Usually S |
| | | Methyl* | ends | | |

CAP = any terminal cap, see for example FIG. 10.
All Stab 00-34 chemistries can comprise 3′-terminal thymidine (TT) residues
All Stab 00-34 chemistries typically comprise about 21 nucleotides, but can vary as described herein.
S = sense strand
AS = antisense strand
*Stab 23 has a single ribonucleotide adjacent to 3′-CAP
*Stab 24 and Stab 28 have a single ribonucleotide at 5′-terminus
*Stab 25, Stab 26, and Stab 27 have three ribonucleotides at 5′-terminus
*Stab 29, Stab 30, Stab 31, Stab 33, and Stab 34 any purine at first three nucleotide positions from 5′-terminus are ribonucleotides
p = phosphorothioate linkage

TABLE V

| | | | | | |
|---|---|---|---|---|---|
| Reagent | Equivalents | Amount | Wait Time* DNA | Wait Time* 2′-O-methyl | Wait Time* RNA |

A. 2.5 μmol Synthesis Cycle ABI 394 Instrument

| | | | | | | | |
|---|---|---|---|---|---|---|---|
| Phosphoramidites | 6.5 | 163 μL | 45 sec | 2.5 | min | 7.5 | min |
| S-Ethyl Tetrazole | 23.8 | 238 μL | 45 sec | 2.5 | min | 7.5 | min |
| Acetic Anhydride | 100 | 233 μL | 5 sec | 5 | sec | 5 | sec |
| N-Methyl Imidazole | 186 | 233 μL | 5 sec | 5 | sec | 5 | sec |
| TCA | 176 | 2.3 mL | 21 sec | 21 | sec | 21 | sec |
| Iodine | 11.2 | 1.7 mL | 45 sec | 45 | sec | 45 | sec |
| Beaucage | 12.9 | 645 μL | 100 sec | 300 | sec | 300 | sec |

| | | | | | |
|---|---|---|---|---|---|
| Acetonitrile | NA | 6.67 mL | NA | NA | NA |

B. 0.2 μmol Synthesis Cycle ABI 394 Instrument

| | | | | | | | |
|---|---|---|---|---|---|---|---|
| Phosphoramidites | 15 | 31 μL | 45 sec | 233 | sec | 465 | sec |
| S-Ethyl Tetrazole | 38.7 | 31 μL | 45 sec | 233 | min | 465 | sec |
| Acetic Anhydride | 655 | 124 μL | 5 sec | 5 | sec | 5 | sec |
| N-Methyl Imidazole | 1245 | 124 μL | 5 sec | 5 | sec | 5 | sec |
| TCA | 700 | 732 μL | 10 sec | 10 | sec | 10 | sec |
| Iodine | 20.6 | 244 μL | 15 sec | 15 | sec | 15 | sec |
| Beaucage | 7.7 | 232 μL | 100 sec | 300 | sec | 300 | sec |

| | | | | | |
|---|---|---|---|---|---|
| Acetonitrile | NA | 2.64 mL | NA | NA | NA |

C. 0.2 μmol Synthesis Cycle 96 well Instrument

| | Equivalents: DNA/ | Amount: DNA/2′-O- | | | Wait Time* 2′-O- | | |
|---|---|---|---|---|---|---|---|
| Reagent | 2′-O-methyl/Ribo | methyl/Ribo | | Wait Time* DNA | methyl | | Wait Time* Ribo |
| Phosphoramidites | 22/33/66 | 40/60/120 | μL | 60 sec | 180 | sec | 360 sec |
| S-Ethyl Tetrazole | 70/105/210 | 40/60/120 | μL | 60 sec | 180 | min | 360 sec |
| Acetic Anhydride | 265/265/265 | 50/50/50 | μL | 10 sec | 10 | sec | 10 sec |
| N-Methyl | 502/502/502 | 50/50/50 | μL | 10 sec | 10 | sec | 10 sec |
| Imidazole | | | | | | | |
| TCA | 238/475/475 | 250/500/500 | μL | 15 sec | 15 | sec | 15 sec |
| Iodine | 6.8/6.8/6.8 | 80/80/80 | μL | 30 sec | 30 | sec | 30 sec |
| Beaucage | 34/51/51 | 80/120/120 | | 100 sec | 200 | sec | 200 sec |

| | | | | | | |
|---|---|---|---|---|---|---|
| Acetonitrile | NA | 1150/1150/1150 | μL | NA | NA | NA |

Wait time does not include contact time during delivery.
Tandem synthesis utilizes double coupling of linker molecule

What we claim is:

1. A double stranded nucleic acid molecule having structure SI comprising a sense strand and an antisense strand: [chemical structure]
wherein the upper strand is the sense strand and the lower strand is the antisense strand of the double stranded nucleic acid molecule; said antisense strand comprises sequence complementary to an interleukin or interleukin receptor RNA; each N is independently a nucleotide; each B is a terminal cap moiety that can be present or absent; (N) represents non-base paired or overhanging nucleotides which can be unmodified or chemically modified; [N] represents nucleotide positions wherein any purine nucleotides when present are ribonucleotides; X1 and X2 are independently integers from about 0 to about 4; X3 is an integer from about 9 to about 21; X4 is an integer from about 11 to about 20, provided that the sum of X4 and X5 is between 17-21; X5 is an integer from about 1 to about 6; and
(a) any pyrimidine nucleotides present in the antisense strand are 2′-deoxy-2′-fluoro nucleotides; any purine nucleotides present in the antisense strand other than the purines nucleotides in the [N] nucleotide positions, are independently 2′-O-methyl nucleotides, 2′-deoxyribonucleotides or a combination of 2′-deoxyribonucleotides and 2′-O-methyl nucleotides;
(b) any pyrimidine nucleotides present in the sense strand are 2′-deoxy-2′-fluoro nucleotides; any purine nucleotides present in the sense strand are independently 2′-deoxyribonucleotides, 2′-O-methyl nucleotides or a combination of 2′-deoxyribonucleotides and 2′-O-methyl nucleotides; and
(c) any (N) nucleotides are optionally deoxyribonucleotides.

2. A double stranded nucleic acid molecule having structure SII comprising a sense strand and an antisense strand: [chemical structure]
wherein the upper strand is the sense strand and the lower strand is the antisense strand of the double stranded nucleic acid molecule; said antisense strand comprises sequence complementary to an interleukin or interleukin receptor RNA; each N is independently a nucleotide; each B is a terminal cap moiety that can be present or absent; (N) represents non-base paired or overhanging nucleotides which can be unmodified or chemically modified; [N] represents nucleotide positions wherein any purine nucleotides when present are ribonucleotides; X1 and X2 are independently integers from about 0 to about 4; X3 is an integer from about 9 to about 21; X4 is an integer from about 11 to about 20, provided that the sum of X4 and X5 is between 17-21; X5 is an integer from about 1 to about 6; and
(a) any pyrimidine nucleotides present in the antisense strand are 2′-deoxy-2′-fluoro nucleotides; any purine nucleotides present in the antisense strand other than the purines nucleotides in the [N] nucleotide positions, are 2′-O-methyl nucleotides;
(b) any pyrimidine nucleotides present in the sense strand are ribonucleotides; any purine nucleotides present in the sense strand are ribonucleotides; and
(c) any (N) nucleotides are optionally deoxyribonucleotides.

3. A double stranded nucleic acid molecule having structure SIII comprising a sense strand and an antisense strand: [chemical structure]
wherein the upper strand is the sense strand and the lower strand is the antisense strand of the double stranded nucleic acid molecule; said antisense strand comprises sequence complementary to an interleukin or interleukin receptor RNA; each N is independently a nucleotide; each B is a terminal cap moiety that can be present or absent; (N) represents non-base paired or overhanging nucleotides which can be unmodified or chemically modified; [N] represents nucleotide positions wherein any purine nucleotides when present are ribonucleotides; X1 and X2 are independently integers from about 0 to about 4; X3 is an integer from about 9 to about 21; X4 is an integer from about 11 to about 20, provided that the sum of X4 and X5 is between 17-21; X5 is an integer from about 1 to about 6; and
(a) any pyrimidine nucleotides present in the antisense strand are 2′-deoxy-2′-fluoro nucleotides; any purine nucleotides present in the antisense strand other than the purines nucleotides in the [N] nucleotide positions, are 2′-O-methyl nucleotides;
(b) any pyrimidine nucleotides present in the sense strand are 2′-deoxy-2′-fluoro nucleotides; any purine nucleotides present in the sense strand are ribonucleotides; and
(c) any (N) nucleotides are optionally deoxyribonucleotides.

4. A double stranded nucleic acid molecule having structure SIV comprising a sense strand and an antisense strand: [chemical structure]
wherein the upper strand is the sense strand and the lower strand is the antisense strand of the double stranded nucleic acid molecule; said antisense strand comprises sequence complementary to an interleukin or interleukin receptor RNA; each N is independently a nucleotide; each B is a terminal cap moiety that can be present or absent; (N) represents non-base paired or overhanging nucleotides which can be unmodified or chemically modified; [N] represents nucleotide positions wherein any purine nucleotides when present are ribonucleotides; X1 and X2 are independently integers from about 0 to about 4; X3 is an integer from about 9 to about 21; X4 is an integer from about 11 to about 20, provided that the sum of X4 and X5 is between 17-21; X5 is an integer from about 1 to about 6; and
(a) any pyrimidine nucleotides present in the antisense strand are 2′-deoxy-2′-fluoro nucleotides; any purine nucleotides present in the antisense strand other than the purines nucleotides in the [N] nucleotide positions, are 2′-O-methyl nucleotides;
(b) any pyrimidine nucleotides present in the sense strand are 2′-deoxy-2′-fluoro nucleotides; any purine nucleotides present in the sense strand are deoxyribonucleotides; and
(c) any (N) nucleotides are optionally deoxyribonucleotides.

5. A double stranded nucleic acid molecule having structure SV comprising a sense strand and an antisense strand: [chemical structure]
wherein the upper strand is the sense strand and the lower strand is the antisense strand of the double stranded nucleic acid molecule; said antisense strand comprises sequence complementary to an interleukin or interleukin receptor RNA; each N is independently a nucleotide; each B is a terminal cap moiety that can be present or absent; (N) represents non-base paired or overhanging nucleotides which can be unmodified or chemically modified; [N] represents nucleotide positions wherein any purine nucleotides when present are ribonucleotides; X1 and X2 are independently integers from about 0 to about 4; X3 is an integer from about 9 to about 21; X4 is an integer from about 11 to about 20, provided that the sum of X4 and X5 is between 17-21; X5 is an integer from about 1 to about 6; and
(a) any pyrimidine nucleotides present in the antisense strand are nucleotides having a ribo-like, Northern or A-form helix configuration; any purine nucleotides present in the antisense strand other than the purines nucleotides in the [N] nucleotide positions, are 2′-O-methyl nucleotides;
(b) any pyrimidine nucleotides present in the sense strand are nucleotides having a ribo-like, Northern or A-form helix configuration; any purine nucleotides present in the sense strand are 2′-O-methyl nucleotides; and
(c) any (N) nucleotides are optionally deoxyribonucleotides.

6. The double stranded nucleic acid molecule of claim 1, wherein X5=1, 2, or 3; each X1 and X2=1 or 2; X3=12, 13, 14, 15, 16, 17, 18, 19, 20, 21, 22, 23, 24, 25, 26, 27, 28, 29, or 30, and X4=15, 16, 17, 18, 19, 20, 21, 22, 23, 24, 25, 26, 27, 28, 29, or 30.

7. The double stranded nucleic acid molecule of claim 2, wherein X5=1, 2, or 3; each X1 and X2=1 or 2; X3=12, 13, 14, 15, 16, 17, 18, 19, 20, 21, 22, 23, 24, 25, 26, 27, 28, 29, or 30, and X4=15, 16, 17, 18, 19, 20, 21, 22, 23, 24, 25, 26, 27, 28, 29, or 30.

8. The double stranded nucleic acid molecule of claim 3, wherein X5=1, 2, or 3; each X1 and X2=1 or 2; X3=12, 13, 14, 15, 16, 17, 18, 19, 20, 21, 22, 23, 24, 25, 26, 27, 28, 29, or 30, and X4=15, 16, 17, 18, 19, 20, 21, 22, 23, 24, 25, 26, 27, 28, 29, or 30.

9. The double stranded nucleic acid molecule of claim 4, wherein X5=1, 2, or 3; each X1 and X2=1 or 2; X3=12, 13, 14, 15, 16, 17, 18, 19, 20, 21, 22, 23, 24, 25, 26, 27, 28, 29, or 30, and X4=15, 16, 17, 18, 19, 20, 21, 22, 23, 24, 25, 26, 27, 28, 29, or 30.

10. The double stranded nucleic acid molecule of claim 5, wherein X5=1, 2, or 3; each X1 and X2=1 or 2; X3=12, 13, 14, 15, 16, 17, 18, 19, 20, 21, 22, 23, 24, 25, 26, 27, 28, 29, or 30, and X4=15, 16, 17, 18, 19, 20, 21, 22, 23, 24, 25, 26, 27, 28, 29, or 30.

11. The double stranded nucleic acid molecule of claim 1, wherein B is present at the 3′ and 5′ ends of the sense strand and at the 3′-end of the antisense strand.

12. The double stranded nucleic acid molecule of claim 2, wherein B is present at the 3′ and 5′ ends of the sense strand and at the 3′-end of the antisense strand.

13. The double stranded nucleic acid molecule of claim 3, wherein B is present at the 3′ and 5′ ends of the sense strand and at the 3′-end of the antisense strand.

14. The double stranded nucleic acid molecule of claim 4, wherein B is present at the 3′ and 5′ ends of the sense strand and at the 3′-end of the antisense strand.

15. The double stranded nucleic acid molecule of claim 5, wherein B is present at the 3′ and 5′ ends of the sense strand and at the 3′-end of the antisense strand.

16. The double stranded nucleic acid molecule of claim 1, comprising one or more phosphorothioate internucleotide linkages at the first terminal (N) on the 3′ end of the sense strand, antisense strand, or both sense strand and antisense strands of the siNA molecule.

17. The double stranded nucleic acid molecule of claim 2, comprising one or more phosphorothioate internucleotide linkages at the first terminal (N) on the 3′ end of the sense strand, antisense strand, or both sense strand and antisense strands of the siNA molecule.

18. The double stranded nucleic acid molecule of claim 3, comprising one or more phosphorothioate internucleotide linkages at the first terminal (N) on the 3′ end of the sense strand, antisense strand, or both sense strand and antisense strands of the siNA molecule.

19. The double stranded nucleic acid molecule of claim 4, comprising one or more phosphorothioate internucleotide linkages at the first terminal (N) on the 3′end of the sense strand, antisense strand, or both sense strand and antisense strands of the siNA molecule.

20. The double stranded nucleic acid molecule of claim 5, comprising one or more phosphorothioate internucleotide linkages at the first terminal (N) on the 3′end of the sense strand, antisense strand, or both sense strand and antisense strands of the siNA molecule.

The application's sequence listing, which the Patent Office published only in electronic form, follows.

SEQUENCE LISTING (2362 sequences)

SEQ ID NO: 1 - RNA, 19 nt, Artificial Sequence
  Synthetic
agagcaagcgccauguuga

SEQ ID NO: 2 - RNA, 19 nt, Artificial Sequence
  Synthetic
aagccaucauuaccauuca

SEQ ID NO: 3 - RNA, 19 nt, Artificial Sequence
  Synthetic
acaucccucuuauuccugc

SEQ ID NO: 4 - RNA, 19 nt, Artificial Sequence
  Synthetic
cagcugccccugcugggag

SEQ ID NO: 5 - RNA, 19 nt, Artificial Sequence
  Synthetic
guggggcugaacacgacaa

SEQ ID NO: 6 - RNA, 19 nt, Artificial Sequence
  Synthetic
auucugacgcccaauggga

SEQ ID NO: 7 - RNA, 19 nt, Artificial Sequence
  Synthetic
aaugaagacaccacagcug

SEQ ID NO: 8 - RNA, 19 nt, Artificial Sequence
  Synthetic
gauuucuuccugaccacua

SEQ ID NO: 9 - RNA, 19 nt, Artificial Sequence
  Synthetic
augcccacugacucccuca

SEQ ID NO: 10 - RNA, 19 nt, Artificial Sequence
  Synthetic
aguguuuccacucugcccc

SEQ ID NO: 11 - RNA, 19 nt, Artificial Sequence
  Synthetic
cucccagagguucaguguu

SEQ ID NO: 12 - RNA, 19 nt, Artificial Sequence
  Synthetic
uuuguguucaaugucgagu

SEQ ID NO: 13 - RNA, 19 nt, Artificial Sequence
  Synthetic
uacaugaauugcacuugga

SEQ ID NO: 14 - RNA, 19 nt, Artificial Sequence
  Synthetic
aacagcagcucugagcccc

SEQ ID NO: 15 - RNA, 19 nt, Artificial Sequence
  Synthetic
cagccuaccaaccucacuc

SEQ ID NO: 16 - RNA, 19 nt, Artificial Sequence
  Synthetic
cugcauuauugguacaaga

SEQ ID NO: 17 - RNA, 19 nt, Artificial Sequence
  Synthetic
aacucggauaaugauaaag

SEQ ID NO: 18 - RNA, 19 nt, Artificial Sequence
  Synthetic
guccagaagugcagccacu

SEQ ID NO: 19 - RNA, 19 nt, Artificial Sequence
  Synthetic
uaucuauucucugaagaaa

SEQ ID NO: 20 - RNA, 19 nt, Artificial Sequence
  Synthetic
aucacuucuggcugucagu

SEQ ID NO: 21 - RNA, 19 nt, Artificial Sequence
  Synthetic
uugcaaaaaaaggagaucc

SEQ ID NO: 22 - RNA, 19 nt, Artificial Sequence
  Synthetic
caccucuaccaaacauuug

SEQ ID NO: 23 - RNA, 19 nt, Artificial Sequence
  Synthetic
guuguucagcuccaggacc

SEQ ID NO: 24 - RNA, 19 nt, Artificial Sequence
  Synthetic
ccacgggaacccaggagac

SEQ ID NO: 25 - RNA, 19 nt, Artificial Sequence
  Synthetic
caggccacacagaugcuaa

SEQ ID NO: 26 - RNA, 19 nt, Artificial Sequence
  Synthetic
aaacugcagaaucugguga

SEQ ID NO: 27 - RNA, 19 nt, Artificial Sequence
  Synthetic
auccccugggcuccagaga

SEQ ID NO: 28 - RNA, 19 nt, Artificial Sequence
  Synthetic
aaccuaacacuucacaaac

SEQ ID NO: 29 - RNA, 19 nt, Artificial Sequence
  Synthetic
cugagugaaucccagcuag

SEQ ID NO: 30 - RNA, 19 nt, Artificial Sequence
  Synthetic
gaacugaacuggaacaaca

SEQ ID NO: 31 - RNA, 19 nt, Artificial Sequence
  Synthetic
agauucuugaaccacuguu

SEQ ID NO: 32 - RNA, 19 nt, Artificial Sequence
  Synthetic
uuggagcacuuggugcagu

SEQ ID NO: 33 - RNA, 19 nt, Artificial Sequence
  Synthetic
uaccggacugacugggacc

SEQ ID NO: 34 - RNA, 19 nt, Artificial Sequence
  Synthetic
cacagcuggacugaacaau

SEQ ID NO: 35 - RNA, 19 nt, Artificial Sequence
  Synthetic
ucaguggauuauagacaua

SEQ ID NO: 36 - RNA, 19 nt, Artificial Sequence
  Synthetic
aaguucuccuugccuagug

SEQ ID NO: 37 - RNA, 19 nt, Artificial Sequence
  Synthetic
guggaugggcagaaacgcu

SEQ ID NO: 38 - RNA, 19 nt, Artificial Sequence
  Synthetic
uacacguuucguguucgga

SEQ ID NO: 39 - RNA, 19 nt, Artificial Sequence
  Synthetic
agccgcuuuaacccacucu

SEQ ID NO: 40 - RNA, 19 nt, Artificial Sequence
  Synthetic
uguggaagugcucagcauu

SEQ ID NO: 41 - RNA, 19 nt, Artificial Sequence
  Synthetic
uggagugaauggagccacc

SEQ ID NO: 42 - RNA, 19 nt, Artificial Sequence
  Synthetic
ccaauccacugggggagca

SEQ ID NO: 43 - RNA, 19 nt, Artificial Sequence
  Synthetic
aauacuucaaaagagaauc

SEQ ID NO: 44 - RNA, 19 nt, Artificial Sequence
  Synthetic
ccuuuccuguuugcauugg

SEQ ID NO: 45 - RNA, 19 nt, Artificial Sequence
  Synthetic
gaagccgugguuaucucug

SEQ ID NO: 46 - RNA, 19 nt, Artificial Sequence
  Synthetic
guuggcuccaugggauuga

SEQ ID NO: 47 - RNA, 19 nt, Artificial Sequence
  Synthetic
auuaucagccuucucugug

SEQ ID NO: 48 - RNA, 19 nt, Artificial Sequence
  Synthetic
guguauuucuggcuggaac

SEQ ID NO: 49 - RNA, 19 nt, Artificial Sequence
  Synthetic
cggacgaugccccgaauuc

SEQ ID NO: 50 - RNA, 19 nt, Artificial Sequence
  Synthetic
cccacccugaagaaccuag

SEQ ID NO: 51 - RNA, 19 nt, Artificial Sequence
  Synthetic
gaggaucuuguuacugaau

SEQ ID NO: 52 - RNA, 19 nt, Artificial Sequence
  Synthetic
uaccacgggaacuuuucgg

SEQ ID NO: 53 - RNA, 19 nt, Artificial Sequence
  Synthetic
gccuggaguggugugucua

SEQ ID NO: 54 - RNA, 19 nt, Artificial Sequence
  Synthetic
aagggacuggcugagaguc

SEQ ID NO: 55 - RNA, 19 nt, Artificial Sequence
  Synthetic
cugcagccagacuacagug

SEQ ID NO: 56 - RNA, 19 nt, Artificial Sequence
  Synthetic
gaacgacucugccucguca

SEQ ID NO: 57 - RNA, 19 nt, Artificial Sequence
  Synthetic
agugagauucccccaaaag

SEQ ID NO: 58 - RNA, 19 nt, Artificial Sequence
  Synthetic
ggaggggcccuuggggagg

SEQ ID NO: 59 - RNA, 19 nt, Artificial Sequence
  Synthetic
gggccuggggccuccccau

SEQ ID NO: 60 - RNA, 19 nt, Artificial Sequence
  Synthetic
ugcaaccagcauagccccu

SEQ ID NO: 61 - RNA, 19 nt, Artificial Sequence
  Synthetic
uacugggcccccccauguu

SEQ ID NO: 62 - RNA, 19 nt, Artificial Sequence
  Synthetic
uacacccuaaagccugaaa

SEQ ID NO: 63 - RNA, 19 nt, Artificial Sequence
  Synthetic
accugaaccccaauccucu

SEQ ID NO: 64 - RNA, 19 nt, Artificial Sequence
  Synthetic
ugacagaagaaccccaggg

SEQ ID NO: 65 - RNA, 19 nt, Artificial Sequence
  Synthetic
guccuguagcccuaagugg

SEQ ID NO: 66 - RNA, 19 nt, Artificial Sequence
  Synthetic
guacuaacuuuccuucauu

SEQ ID NO: 67 - RNA, 19 nt, Artificial Sequence
  Synthetic
ucaacccaccugcgucuca

SEQ ID NO: 68 - RNA, 19 nt, Artificial Sequence
  Synthetic
auacucaccucaccccacu

SEQ ID NO: 69 - RNA, 19 nt, Artificial Sequence
  Synthetic
uguggcugauuuggaauuu

SEQ ID NO: 70 - RNA, 19 nt, Artificial Sequence
  Synthetic
uugugcccccauguaagca

SEQ ID NO: 71 - RNA, 19 nt, Artificial Sequence
  Synthetic
accccuucauuuggcauuc

SEQ ID NO: 72 - RNA, 19 nt, Artificial Sequence
  Synthetic
ccccacuugagaauuaccc

SEQ ID NO: 73 - RNA, 19 nt, Artificial Sequence
  Synthetic
cuuuugccccgaacauguu

SEQ ID NO: 74 - RNA, 19 nt, Artificial Sequence
  Synthetic
uuuucuucucccucagucu

SEQ ID NO: 75 - RNA, 19 nt, Artificial Sequence
  Synthetic
uggcccuuccuuuucgcag

SEQ ID NO: 76 - RNA, 19 nt, Artificial Sequence
  Synthetic
ggauucuuccucccucccu

SEQ ID NO: 77 - RNA, 19 nt, Artificial Sequence
  Synthetic
ucuuucccucccuuccucu

SEQ ID NO: 78 - RNA, 19 nt, Artificial Sequence
  Synthetic
uuuccaucuacccuccgau

SEQ ID NO: 79 - RNA, 19 nt, Artificial Sequence
  Synthetic
uuguuccugaaccgaugag

SEQ ID NO: 80 - RNA, 19 nt, Artificial Sequence
  Synthetic
gaaauaaaguuucuguuga

SEQ ID NO: 81 - RNA, 19 nt, Artificial Sequence
  Synthetic
aaguuucuguugauaauca

SEQ ID NO: 82 - RNA, 19 nt, Artificial Sequence
  Synthetic
ucaacauggcgcuugcucu

SEQ ID NO: 83 - RNA, 19 nt, Artificial Sequence
  Synthetic
ugaaugguaaugauggcuu

SEQ ID NO: 84 - RNA, 19 nt, Artificial Sequence
  Synthetic
gcaggaauaagagggaugu

SEQ ID NO: 85 - RNA, 19 nt, Artificial Sequence
  Synthetic
cucccagcaggggcagcug

SEQ ID NO: 86 - RNA, 19 nt, Artificial Sequence
  Synthetic
uugucguguucagccccac

SEQ ID NO: 87 - RNA, 19 nt, Artificial Sequence
  Synthetic
ucccauugggcgucagaau

SEQ ID NO: 88 - RNA, 19 nt, Artificial Sequence
  Synthetic
cagcuguggugucuucauu

SEQ ID NO: 89 - RNA, 19 nt, Artificial Sequence
  Synthetic
uaguggucaggaagaaauc

SEQ ID NO: 90 - RNA, 19 nt, Artificial Sequence
  Synthetic
ugagggagucagugggcau

SEQ ID NO: 91 - RNA, 19 nt, Artificial Sequence
  Synthetic
ggggcagaguggaaacacu

SEQ ID NO: 92 - RNA, 19 nt, Artificial Sequence
  Synthetic
aacacugaaccucugggag

SEQ ID NO: 93 - RNA, 19 nt, Artificial Sequence
  Synthetic
acucgacauugaacacaaa

SEQ ID NO: 94 - RNA, 19 nt, Artificial Sequence
  Synthetic
uccaagugcaauucaugua

SEQ ID NO: 95 - RNA, 19 nt, Artificial Sequence
  Synthetic
ggggcucagagcugcuguu

SEQ ID NO: 96 - RNA, 19 nt, Artificial Sequence
  Synthetic
gagugagguugguaggcug

SEQ ID NO: 97 - RNA, 19 nt, Artificial Sequence
  Synthetic
ucuuguaccaauaaugcag

SEQ ID NO: 98 - RNA, 19 nt, Artificial Sequence
  Synthetic
cuuuaucauuauccgaguu

SEQ ID NO: 99 - RNA, 19 nt, Artificial Sequence
  Synthetic
aguggcugcacuucuggac

SEQ ID NO: 100 - RNA, 19 nt, Artificial Sequence
  Synthetic
uuucuucagagaauagaua

SEQ ID NO: 101 - RNA, 19 nt, Artificial Sequence
  Synthetic
acugacagccagaagugau

SEQ ID NO: 102 - RNA, 19 nt, Artificial Sequence
  Synthetic
ggaucuccuuuuuuugcaa

SEQ ID NO: 103 - RNA, 19 nt, Artificial Sequence
  Synthetic
caaauguuugguagaggug

SEQ ID NO: 104 - RNA, 19 nt, Artificial Sequence
  Synthetic
gguccuggagcugaacaac

SEQ ID NO: 105 - RNA, 19 nt, Artificial Sequence
  Synthetic
gucuccuggguucccgugg

SEQ ID NO: 106 - RNA, 19 nt, Artificial Sequence
  Synthetic
uuagcaucuguguggccug

SEQ ID NO: 107 - RNA, 19 nt, Artificial Sequence
  Synthetic
ucaccagauucugcaguuu

SEQ ID NO: 108 - RNA, 19 nt, Artificial Sequence
  Synthetic
ucucuggagcccaggggau

SEQ ID NO: 109 - RNA, 19 nt, Artificial Sequence
  Synthetic
guuugugaaguguuagguu

SEQ ID NO: 110 - RNA, 19 nt, Artificial Sequence
  Synthetic
cuagcugggauucacucag

SEQ ID NO: 111 - RNA, 19 nt, Artificial Sequence
  Synthetic
uguuguuccaguucaguuc

SEQ ID NO: 112 - RNA, 19 nt, Artificial Sequence
  Synthetic
aacagugguucaagaaucu

SEQ ID NO: 113 - RNA, 19 nt, Artificial Sequence
  Synthetic
acugcaccaagugcuccaa

SEQ ID NO: 114 - RNA, 19 nt, Artificial Sequence
  Synthetic
ggucccagucaguccggua

SEQ ID NO: 115 - RNA, 19 nt, Artificial Sequence
  Synthetic
auuguucaguccagcugug

SEQ ID NO: 116 - RNA, 19 nt, Artificial Sequence
  Synthetic
uaugucuauaauccacuga

SEQ ID NO: 117 - RNA, 19 nt, Artificial Sequence
  Synthetic
cacuaggcaaggagaacuu

SEQ ID NO: 118 - RNA, 19 nt, Artificial Sequence
  Synthetic
agcguuucugcccauccac

SEQ ID NO: 119 - RNA, 19 nt, Artificial Sequence
  Synthetic
uccgaacacgaaacgugua

SEQ ID NO: 120 - RNA, 19 nt, Artificial Sequence
  Synthetic
agaguggguuaaagcggcu

SEQ ID NO: 121 - RNA, 19 nt, Artificial Sequence
  Synthetic
aaugcugagcacuuccaca

SEQ ID NO: 122 - RNA, 19 nt, Artificial Sequence
  Synthetic
gguggcuccauucacucca

SEQ ID NO: 123 - RNA, 19 nt, Artificial Sequence
  Synthetic
ugcucccccaguggauugg

SEQ ID NO: 124 - RNA, 19 nt, Artificial Sequence
  Synthetic
gauucucuuuugaaguauu

SEQ ID NO: 125 - RNA, 19 nt, Artificial Sequence
  Synthetic
ccaaugcaaacaggaaagg

SEQ ID NO: 126 - RNA, 19 nt, Artificial Sequence
  Synthetic
cagagauaaccacggcuuc

SEQ ID NO: 127 - RNA, 19 nt, Artificial Sequence
  Synthetic
ucaaucccauggagccaac

SEQ ID NO: 128 - RNA, 19 nt, Artificial Sequence
  Synthetic
cacagagaaggcugauaau

SEQ ID NO: 129 - RNA, 19 nt, Artificial Sequence
  Synthetic
guuccagccagaaauacac

SEQ ID NO: 130 - RNA, 19 nt, Artificial Sequence
  Synthetic
gaauucggggcaucguccg

SEQ ID NO: 131 - RNA, 19 nt, Artificial Sequence
  Synthetic
cuagguucuucaggguggg

SEQ ID NO: 132 - RNA, 19 nt, Artificial Sequence
  Synthetic
auucaguaacaagauccuc

SEQ ID NO: 133 - RNA, 19 nt, Artificial Sequence
  Synthetic
ccgaaaaguucccguggua

SEQ ID NO: 134 - RNA, 19 nt, Artificial Sequence
  Synthetic
uagacacaccacuccaggc

SEQ ID NO: 135 - RNA, 19 nt, Artificial Sequence
  Synthetic
gacucucagccagucccuu

SEQ ID NO: 136 - RNA, 19 nt, Artificial Sequence
  Synthetic
cacuguagucuggcugcag

SEQ ID NO: 137 - RNA, 19 nt, Artificial Sequence
  Synthetic
ugacgaggcagagucguuc

SEQ ID NO: 138 - RNA, 19 nt, Artificial Sequence
  Synthetic
cuuuugggggaaucucacu

SEQ ID NO: 139 - RNA, 19 nt, Artificial Sequence
  Synthetic
ccuccccaagggccccucc

SEQ ID NO: 140 - RNA, 19 nt, Artificial Sequence
  Synthetic
auggggaggccccaggccc

SEQ ID NO: 141 - RNA, 19 nt, Artificial Sequence
  Synthetic
aggggcuaugcugguugca

SEQ ID NO: 142 - RNA, 19 nt, Artificial Sequence
  Synthetic
aacaugggggggcccagua

SEQ ID NO: 143 - RNA, 19 nt, Artificial Sequence
  Synthetic
uuucaggcuuuagggugua

SEQ ID NO: 144 - RNA, 19 nt, Artificial Sequence
  Synthetic
agaggauugggguucaggu

SEQ ID NO: 145 - RNA, 19 nt, Artificial Sequence
  Synthetic
cccugggguucuucuguca

SEQ ID NO: 146 - RNA, 19 nt, Artificial Sequence
  Synthetic
ccacuuagggcuacaggac

SEQ ID NO: 147 - RNA, 19 nt, Artificial Sequence
  Synthetic
aaugaaggaaaguuaguac

SEQ ID NO: 148 - RNA, 19 nt, Artificial Sequence
  Synthetic
ugagacgcagguggguuga

SEQ ID NO: 149 - RNA, 19 nt, Artificial Sequence
  Synthetic
aguggggugaggugaguau

SEQ ID NO: 150 - RNA, 19 nt, Artificial Sequence
  Synthetic
aaauuccaaaucagccaca

SEQ ID NO: 151 - RNA, 19 nt, Artificial Sequence
  Synthetic
ugcuuacaugggggcacaa

SEQ ID NO: 152 - RNA, 19 nt, Artificial Sequence
  Synthetic
gaaugccaaaugaaggggu

SEQ ID NO: 153 - RNA, 19 nt, Artificial Sequence
  Synthetic
ggguaauucucaagugggg

SEQ ID NO: 154 - RNA, 19 nt, Artificial Sequence
  Synthetic
aacauguucggggcaaaag

SEQ ID NO: 155 - RNA, 19 nt, Artificial Sequence
  Synthetic
agacugagggagaagaaaa

SEQ ID NO: 156 - RNA, 19 nt, Artificial Sequence
  Synthetic
cugcgaaaaggaagggcca

SEQ ID NO: 157 - RNA, 19 nt, Artificial Sequence
  Synthetic
agggagggaggaagaaucc

SEQ ID NO: 158 - RNA, 19 nt, Artificial Sequence
  Synthetic
agaggaagggagggaaaga

SEQ ID NO: 159 - RNA, 19 nt, Artificial Sequence
  Synthetic
aucggaggguagauggaaa

SEQ ID NO: 160 - RNA, 19 nt, Artificial Sequence
  Synthetic
cucaucgguucaggaacaa

SEQ ID NO: 161 - RNA, 19 nt, Artificial Sequence
  Synthetic
ucaacagaaacuuuauuuc

SEQ ID NO: 162 - RNA, 19 nt, Artificial Sequence
  Synthetic
ugauuaucaacagaaacuu

SEQ ID NO: 163 - RNA, 19 nt, Artificial Sequence
  Synthetic
cuaugcaaagcaaaaagcc

SEQ ID NO: 164 - RNA, 19 nt, Artificial Sequence
  Synthetic
cagcagcagccccaagcug

SEQ ID NO: 165 - RNA, 19 nt, Artificial Sequence
  Synthetic
gauaagauuaaucuaaaga

SEQ ID NO: 166 - RNA, 19 nt, Artificial Sequence
  Synthetic
agcaaauuaugguguaauu

SEQ ID NO: 167 - RNA, 19 nt, Artificial Sequence
  Synthetic
uuccuaugcugaaacuuug

SEQ ID NO: 168 - RNA, 19 nt, Artificial Sequence
  Synthetic
guaguuaauuuuuuaaaaa

SEQ ID NO: 169 - RNA, 19 nt, Artificial Sequence
  Synthetic
agguuucauuuuccuauug

SEQ ID NO: 170 - RNA, 19 nt, Artificial Sequence
  Synthetic
ggucugauuucacaggaac

SEQ ID NO: 171 - RNA, 19 nt, Artificial Sequence
  Synthetic
cauuuuaccuguuugugag

SEQ ID NO: 172 - RNA, 19 nt, Artificial Sequence
  Synthetic
ggcauuuuuucuccuggaa

SEQ ID NO: 173 - RNA, 19 nt, Artificial Sequence
  Synthetic
agagaggugcugauuggcc

SEQ ID NO: 174 - RNA, 19 nt, Artificial Sequence
  Synthetic
cccaagugacugacaaucu

SEQ ID NO: 175 - RNA, 19 nt, Artificial Sequence
  Synthetic
ugguguaacgaaaauuucc

SEQ ID NO: 176 - RNA, 19 nt, Artificial Sequence
  Synthetic
caauguaaacucauuuucc

SEQ ID NO: 177 - RNA, 19 nt, Artificial Sequence
  Synthetic
ccucgguuucagcaauuuu

SEQ ID NO: 178 - RNA, 19 nt, Artificial Sequence
  Synthetic
uaaaucuauauauagagau

SEQ ID NO: 179 - RNA, 19 nt, Artificial Sequence
  Synthetic
uaucuuugucagcauugca

SEQ ID NO: 180 - RNA, 19 nt, Artificial Sequence
  Synthetic
aucguuagcuucuccugau

SEQ ID NO: 181 - RNA, 19 nt, Artificial Sequence
  Synthetic
uaaacuaauugccucacau

SEQ ID NO: 182 - RNA, 19 nt, Artificial Sequence
  Synthetic
uugucacugcaaaucgaca

SEQ ID NO: 183 - RNA, 19 nt, Artificial Sequence
  Synthetic
accuauuaaugggucucac

SEQ ID NO: 184 - RNA, 19 nt, Artificial Sequence
  Synthetic
ccucccaacugcuuccccc

SEQ ID NO: 185 - RNA, 19 nt, Artificial Sequence
  Synthetic
cucuguucuuccugcuagc

SEQ ID NO: 186 - RNA, 19 nt, Artificial Sequence
  Synthetic
caugugccggcaacuuugu

SEQ ID NO: 187 - RNA, 19 nt, Artificial Sequence
  Synthetic
uccacggacacaagugcga

SEQ ID NO: 188 - RNA, 19 nt, Artificial Sequence
  Synthetic
auaucaccuuacaggagau

SEQ ID NO: 189 - RNA, 19 nt, Artificial Sequence
  Synthetic
ucaucaaaacuuugaacag

SEQ ID NO: 190 - RNA, 19 nt, Artificial Sequence
  Synthetic
gccucacagagcagaagac

SEQ ID NO: 191 - RNA, 19 nt, Artificial Sequence
  Synthetic
cucugugcaccgaguugac

SEQ ID NO: 192 - RNA, 19 nt, Artificial Sequence
  Synthetic
ccguaacagacaucuuugc

SEQ ID NO: 193 - RNA, 19 nt, Artificial Sequence
  Synthetic
cugccuccaagaacacaac

SEQ ID NO: 194 - RNA, 19 nt, Artificial Sequence
  Synthetic
cugagaaggaaaccuucug

SEQ ID NO: 195 - RNA, 19 nt, Artificial Sequence
  Synthetic
gcagggcugcgacugugcu

SEQ ID NO: 196 - RNA, 19 nt, Artificial Sequence
  Synthetic
uccggcaguucuacagcca

SEQ ID NO: 197 - RNA, 19 nt, Artificial Sequence
  Synthetic
accaugagaaggacacucg

SEQ ID NO: 198 - RNA, 19 nt, Artificial Sequence
  Synthetic
gcugccugggugcgacugc

SEQ ID NO: 199 - RNA, 19 nt, Artificial Sequence
  Synthetic
cacagcaguuccacaggca

SEQ ID NO: 200 - RNA, 19 nt, Artificial Sequence
  Synthetic
acaagcagcugauccgauu

SEQ ID NO: 201 - RNA, 19 nt, Artificial Sequence
  Synthetic
uccugaaacggcucgacag

SEQ ID NO: 202 - RNA, 19 nt, Artificial Sequence
  Synthetic
ggaaccucuggggccuggc

SEQ ID NO: 203 - RNA, 19 nt, Artificial Sequence
  Synthetic
cgggcuugaauuccugucc

SEQ ID NO: 204 - RNA, 19 nt, Artificial Sequence
  Synthetic
cugugaaggaagccaacca

SEQ ID NO: 205 - RNA, 19 nt, Artificial Sequence
  Synthetic
agaguacguuggaaaacuu

SEQ ID NO: 206 - RNA, 19 nt, Artificial Sequence
  Synthetic
ucuuggaaaggcuaaagac

SEQ ID NO: 207 - RNA, 19 nt, Artificial Sequence
  Synthetic
cgaucaugagagagaaaua

SEQ ID NO: 208 - RNA, 19 nt, Artificial Sequence
  Synthetic
auucaaaguguucgagcug

SEQ ID NO: 209 - RNA, 19 nt, Artificial Sequence
  Synthetic
gaauauuuuaauuuaugag

SEQ ID NO: 210 - RNA, 19 nt, Artificial Sequence
  Synthetic
guuuuugauagcuuuauuu

SEQ ID NO: 211 - RNA, 19 nt, Artificial Sequence
  Synthetic
uuuuaaguauuuauauauu

SEQ ID NO: 212 - RNA, 19 nt, Artificial Sequence
  Synthetic
uuauaacucaucauaaaau

SEQ ID NO: 213 - RNA, 19 nt, Artificial Sequence
  Synthetic
aauaaaguauauauagaau

SEQ ID NO: 214 - RNA, 19 nt, Artificial Sequence
  Synthetic
ggcuuuuugcuuugcauag

SEQ ID NO: 215 - RNA, 19 nt, Artificial Sequence
  Synthetic
cagcuuggggcugcugcug

SEQ ID NO: 216 - RNA, 19 nt, Artificial Sequence
  Synthetic
ucuuuagauuaaucuuauc

SEQ ID NO: 217 - RNA, 19 nt, Artificial Sequence
  Synthetic
aauuacaccauaauuugcu

SEQ ID NO: 218 - RNA, 19 nt, Artificial Sequence
  Synthetic
caaaguuucagcauaggaa

SEQ ID NO: 219 - RNA, 19 nt, Artificial Sequence
  Synthetic
uuuuuaaaaaauuaacuac

SEQ ID NO: 220 - RNA, 19 nt, Artificial Sequence
  Synthetic
caauaggaaaaugaaaccu

SEQ ID NO: 221 - RNA, 19 nt, Artificial Sequence
  Synthetic
guuccugugaaaucagacc

SEQ ID NO: 222 - RNA, 19 nt, Artificial Sequence
  Synthetic
cucacaaacagguaaaaug

SEQ ID NO: 223 - RNA, 19 nt, Artificial Sequence
  Synthetic
uuccaggagaaaaaaugcc

SEQ ID NO: 224 - RNA, 19 nt, Artificial Sequence
  Synthetic
ggccaaucagcaccucucu

SEQ ID NO: 225 - RNA, 19 nt, Artificial Sequence
  Synthetic
agauugucagucacuuggg

SEQ ID NO: 226 - RNA, 19 nt, Artificial Sequence
  Synthetic
ggaaauuuucguuacacca

SEQ ID NO: 227 - RNA, 19 nt, Artificial Sequence
  Synthetic
ggaaaaugaguuuacauug

SEQ ID NO: 228 - RNA, 19 nt, Artificial Sequence
  Synthetic
aaaauugcugaaaccgagg

SEQ ID NO: 229 - RNA, 19 nt, Artificial Sequence
  Synthetic
aucucuauauauagauuua

SEQ ID NO: 230 - RNA, 19 nt, Artificial Sequence
  Synthetic
ugcaaugcugacaaagaua

SEQ ID NO: 231 - RNA, 19 nt, Artificial Sequence
  Synthetic
aucaggagaagcuaacgau

SEQ ID NO: 232 - RNA, 19 nt, Artificial Sequence
  Synthetic
augugaggcaauuaguuua

SEQ ID NO: 233 - RNA, 19 nt, Artificial Sequence
  Synthetic
ugucgauuugcagugacaa

SEQ ID NO: 234 - RNA, 19 nt, Artificial Sequence
  Synthetic
gugagacccauuaauaggu

SEQ ID NO: 235 - RNA, 19 nt, Artificial Sequence
  Synthetic
gggggaagcaguugggagg

SEQ ID NO: 236 - RNA, 19 nt, Artificial Sequence
  Synthetic
gcuagcaggaagaacagag

SEQ ID NO: 237 - RNA, 19 nt, Artificial Sequence
  Synthetic
acaaaguugccggcacaug

SEQ ID NO: 238 - RNA, 19 nt, Artificial Sequence
  Synthetic
ucgcacuuguguccgugga

SEQ ID NO: 239 - RNA, 19 nt, Artificial Sequence
  Synthetic
aucuccuguaaggugauau

SEQ ID NO: 240 - RNA, 19 nt, Artificial Sequence
  Synthetic
cuguucaaaguuuugauga

SEQ ID NO: 241 - RNA, 19 nt, Artificial Sequence
  Synthetic
gucuucugcucugugaggc

SEQ ID NO: 242 - RNA, 19 nt, Artificial Sequence
  Synthetic
gucaacucggugcacagag

SEQ ID NO: 243 - RNA, 19 nt, Artificial Sequence
  Synthetic
gcaaagaugucuguuacgg

SEQ ID NO: 244 - RNA, 19 nt, Artificial Sequence
  Synthetic
guuguguucuuggaggcag

SEQ ID NO: 245 - RNA, 19 nt, Artificial Sequence
  Synthetic
cagaagguuuccuucucag

SEQ ID NO: 246 - RNA, 19 nt, Artificial Sequence
  Synthetic
agcacagucgcagcccugc

SEQ ID NO: 247 - RNA, 19 nt, Artificial Sequence
  Synthetic
uggcuguagaacugccgga

SEQ ID NO: 248 - RNA, 19 nt, Artificial Sequence
  Synthetic
cgaguguccuucucauggu

SEQ ID NO: 249 - RNA, 19 nt, Artificial Sequence
  Synthetic
gcagucgcacccaggcagc

SEQ ID NO: 250 - RNA, 19 nt, Artificial Sequence
  Synthetic
ugccuguggaacugcugug

SEQ ID NO: 251 - RNA, 19 nt, Artificial Sequence
  Synthetic
aaucggaucagcugcuugu

SEQ ID NO: 252 - RNA, 19 nt, Artificial Sequence
  Synthetic
cugucgagccguuucagga

SEQ ID NO: 253 - RNA, 19 nt, Artificial Sequence
  Synthetic
gccaggccccagagguucc

SEQ ID NO: 254 - RNA, 19 nt, Artificial Sequence
  Synthetic
ggacaggaauucaagcccg

SEQ ID NO: 255 - RNA, 19 nt, Artificial Sequence
  Synthetic
ugguuggcuuccuucacag

SEQ ID NO: 256 - RNA, 19 nt, Artificial Sequence
  Synthetic
aaguuuuccaacguacucu

SEQ ID NO: 257 - RNA, 19 nt, Artificial Sequence
  Synthetic
gucuuuagccuuuccaaga

SEQ ID NO: 258 - RNA, 19 nt, Artificial Sequence
  Synthetic
uauuucucucucaugaucg

SEQ ID NO: 259 - RNA, 19 nt, Artificial Sequence
  Synthetic
cagcucgaacacuuugaau

SEQ ID NO: 260 - RNA, 19 nt, Artificial Sequence
  Synthetic
cucauaaauuaaaauauuc

SEQ ID NO: 261 - RNA, 19 nt, Artificial Sequence
  Synthetic
aaauaaagcuaucaaaaac

SEQ ID NO: 262 - RNA, 19 nt, Artificial Sequence
  Synthetic
aauauauaaauacuuaaaa

SEQ ID NO: 263 - RNA, 19 nt, Artificial Sequence
  Synthetic
auuuuaugaugaguuauaa

SEQ ID NO: 264 - RNA, 19 nt, Artificial Sequence
  Synthetic
auucuauauauacuuuauu

SEQ ID NO: 265 - RNA, 19 nt, Artificial Sequence
  Synthetic
cgaauggagcaggggcgcg

SEQ ID NO: 266 - RNA, 19 nt, Artificial Sequence
  Synthetic
gcagauaauuaaagauuua

SEQ ID NO: 267 - RNA, 19 nt, Artificial Sequence
  Synthetic
acacacagcuggaagaaau

SEQ ID NO: 268 - RNA, 19 nt, Artificial Sequence
  Synthetic
ucauagagaagccgggcgu

SEQ ID NO: 269 - RNA, 19 nt, Artificial Sequence
  Synthetic
ugguggcucaugccuauaa

SEQ ID NO: 270 - RNA, 19 nt, Artificial Sequence
  Synthetic
aucccagcacuuuuggagg

SEQ ID NO: 271 - RNA, 19 nt, Artificial Sequence
  Synthetic
gcugaggcgggcagaucac

SEQ ID NO: 272 - RNA, 19 nt, Artificial Sequence
  Synthetic
cuugagaucaggaguucga

SEQ ID NO: 273 - RNA, 19 nt, Artificial Sequence
  Synthetic
agaccagccuggugccuug

SEQ ID NO: 274 - RNA, 19 nt, Artificial Sequence
  Synthetic
ggcaucucccaauggggug

SEQ ID NO: 275 - RNA, 19 nt, Artificial Sequence
  Synthetic
ggcuuugcucugggcuccu

SEQ ID NO: 276 - RNA, 19 nt, Artificial Sequence
  Synthetic
uguucccugugagcugccu

SEQ ID NO: 277 - RNA, 19 nt, Artificial Sequence
  Synthetic
ugguccugcugcagguggc

SEQ ID NO: 278 - RNA, 19 nt, Artificial Sequence
  Synthetic
caagcucugggaacaugaa

SEQ ID NO: 279 - RNA, 19 nt, Artificial Sequence
  Synthetic
aggucuugcaggagcccac

SEQ ID NO: 280 - RNA, 19 nt, Artificial Sequence
  Synthetic
ccugcgucuccgacuacau

SEQ ID NO: 281 - RNA, 19 nt, Artificial Sequence
  Synthetic
ugagcaucucuacuugcga

SEQ ID NO: 282 - RNA, 19 nt, Artificial Sequence
  Synthetic
aguggaagaugaauggucc

SEQ ID NO: 283 - RNA, 19 nt, Artificial Sequence
  Synthetic
ccaccaauugcagcaccga

SEQ ID NO: 284 - RNA, 19 nt, Artificial Sequence
  Synthetic
agcuccgccuguuguacca

SEQ ID NO: 285 - RNA, 19 nt, Artificial Sequence
  Synthetic
agcugguuuuucugcucuc

SEQ ID NO: 286 - RNA, 19 nt, Artificial Sequence
  Synthetic
ccgaagcccacacguguau

SEQ ID NO: 287 - RNA, 19 nt, Artificial Sequence
  Synthetic
ucccugagaacaacggagg

SEQ ID NO: 288 - RNA, 19 nt, Artificial Sequence
  Synthetic
gcgcggggugcgugugcca

SEQ ID NO: 289 - RNA, 19 nt, Artificial Sequence
  Synthetic
accugcucauggaugacgu

SEQ ID NO: 290 - RNA, 19 nt, Artificial Sequence
  Synthetic
uggucagugcggauaacua

SEQ ID NO: 291 - RNA, 19 nt, Artificial Sequence
  Synthetic
auacacuggaccugugggc

SEQ ID NO: 292 - RNA, 19 nt, Artificial Sequence
  Synthetic
cugggcagcagcugcugug

SEQ ID NO: 293 - RNA, 19 nt, Artificial Sequence
  Synthetic
ggaagggcuccuucaagcc

SEQ ID NO: 294 - RNA, 19 nt, Artificial Sequence
  Synthetic
ccagcgagcaugugaaacc

SEQ ID NO: 295 - RNA, 19 nt, Artificial Sequence
  Synthetic
ccagggccccaggaaaccu

SEQ ID NO: 296 - RNA, 19 nt, Artificial Sequence
  Synthetic
ugacaguucacaccaaugu

SEQ ID NO: 297 - RNA, 19 nt, Artificial Sequence
  Synthetic
ucuccgacacucugcugcu

SEQ ID NO: 298 - RNA, 19 nt, Artificial Sequence
  Synthetic
ugaccuggagcaacccgua

SEQ ID NO: 299 - RNA, 19 nt, Artificial Sequence
  Synthetic
aucccccugacaauuaccu

SEQ ID NO: 300 - RNA, 19 nt, Artificial Sequence
  Synthetic
uguauaaucaucucaccua

SEQ ID NO: 301 - RNA, 19 nt, Artificial Sequence
  Synthetic
augcagucaacauuuggag

SEQ ID NO: 302 - RNA, 19 nt, Artificial Sequence
  Synthetic
gugaaaacgacccggcaga

SEQ ID NO: 303 - RNA, 19 nt, Artificial Sequence
  Synthetic
auuucagaaucuauaacgu

SEQ ID NO: 304 - RNA, 19 nt, Artificial Sequence
  Synthetic
ugaccuaccuagaacccuc

SEQ ID NO: 305 - RNA, 19 nt, Artificial Sequence
  Synthetic
cccuccgcaucgcagccag

SEQ ID NO: 306 - RNA, 19 nt, Artificial Sequence
  Synthetic
gcacccugaagucugggau

SEQ ID NO: 307 - RNA, 19 nt, Artificial Sequence
  Synthetic
uuuccuacagggcacgggu

SEQ ID NO: 308 - RNA, 19 nt, Artificial Sequence
  Synthetic
ugagggccugggcucagug

SEQ ID NO: 309 - RNA, 19 nt, Artificial Sequence
  Synthetic
gcuauaacaccaccuggag

SEQ ID NO: 310 - RNA, 19 nt, Artificial Sequence
  Synthetic
gugaguggagccccagcac

SEQ ID NO: 311 - RNA, 19 nt, Artificial Sequence
  Synthetic
ccaaguggcacaacuccua

SEQ ID NO: 312 - RNA, 19 nt, Artificial Sequence
  Synthetic
acagggagcccuucgagca

SEQ ID NO: 313 - RNA, 19 nt, Artificial Sequence
  Synthetic
agcaccuccugcugggcgu

SEQ ID NO: 314 - RNA, 19 nt, Artificial Sequence
  Synthetic
ucagcguuuccugcauugu

SEQ ID NO: 315 - RNA, 19 nt, Artificial Sequence
  Synthetic
ucauccuggccgucugccu

SEQ ID NO: 316 - RNA, 19 nt, Artificial Sequence
  Synthetic
uguugugcuaugucagcau

SEQ ID NO: 317 - RNA, 19 nt, Artificial Sequence
  Synthetic
ucaccaagauuaagaaaga

SEQ ID NO: 318 - RNA, 19 nt, Artificial Sequence
  Synthetic
aauggugggaucagauucc

SEQ ID NO: 319 - RNA, 19 nt, Artificial Sequence
  Synthetic
ccaacccagcccgcagccg

SEQ ID NO: 320 - RNA, 19 nt, Artificial Sequence
  Synthetic
gccucguggcuauaauaau

SEQ ID NO: 321 - RNA, 19 nt, Artificial Sequence
  Synthetic
uccaggaugcucagggguc

SEQ ID NO: 322 - RNA, 19 nt, Artificial Sequence
  Synthetic
cacagugggagaagcgguc

SEQ ID NO: 323 - RNA, 19 nt, Artificial Sequence
  Synthetic
cccgaggccaggaaccagc

SEQ ID NO: 324 - RNA, 19 nt, Artificial Sequence
  Synthetic
ccaagugcccacacuggaa

SEQ ID NO: 325 - RNA, 19 nt, Artificial Sequence
  Synthetic
agaauugucuuaccaagcu

SEQ ID NO: 326 - RNA, 19 nt, Artificial Sequence
  Synthetic
ucuugcccuguuuucugga

SEQ ID NO: 327 - RNA, 19 nt, Artificial Sequence
  Synthetic
agcacaacaugaaaaggga

SEQ ID NO: 328 - RNA, 19 nt, Artificial Sequence
  Synthetic
augaagauccucacaaggc

SEQ ID NO: 329 - RNA, 19 nt, Artificial Sequence
  Synthetic
cugccaaagagaugccuuu

SEQ ID NO: 330 - RNA, 19 nt, Artificial Sequence
  Synthetic
uccagggcucuggaaaauc

SEQ ID NO: 331 - RNA, 19 nt, Artificial Sequence
  Synthetic
cagcauggugcccagugga

SEQ ID NO: 332 - RNA, 19 nt, Artificial Sequence
  Synthetic
agaucagcaagacaguccu

SEQ ID NO: 333 - RNA, 19 nt, Artificial Sequence
  Synthetic
ucuggccagagagcaucag

SEQ ID NO: 334 - RNA, 19 nt, Artificial Sequence
  Synthetic
gcguggugcgaugugugga

SEQ ID NO: 335 - RNA, 19 nt, Artificial Sequence
  Synthetic
aguuguuugaggccccggu

SEQ ID NO: 336 - RNA, 19 nt, Artificial Sequence
  Synthetic
uggagugugaggaggagga

SEQ ID NO: 337 - RNA, 19 nt, Artificial Sequence
  Synthetic
aggagguagaggaagaaaa

SEQ ID NO: 338 - RNA, 19 nt, Artificial Sequence
  Synthetic
aagggagcuucugugcauc

SEQ ID NO: 339 - RNA, 19 nt, Artificial Sequence
  Synthetic
cgccugagagcagcaggga

SEQ ID NO: 340 - RNA, 19 nt, Artificial Sequence
  Synthetic
augacuuccaggagggaag

SEQ ID NO: 341 - RNA, 19 nt, Artificial Sequence
  Synthetic
gggagggcauuguggcccg

SEQ ID NO: 342 - RNA, 19 nt, Artificial Sequence
  Synthetic
ggcuaacagagagccuguu

SEQ ID NO: 343 - RNA, 19 nt, Artificial Sequence
  Synthetic
uccuggaccugcucggaga

SEQ ID NO: 344 - RNA, 19 nt, Artificial Sequence
  Synthetic
aggagaaugggggcuuuug

SEQ ID NO: 345 - RNA, 19 nt, Artificial Sequence
  Synthetic
gccagcaggacauggggga

SEQ ID NO: 346 - RNA, 19 nt, Artificial Sequence
  Synthetic
agucaugccuucuuccacc

SEQ ID NO: 347 - RNA, 19 nt, Artificial Sequence
  Synthetic
cuucgggaaguacgagugc

SEQ ID NO: 348 - RNA, 19 nt, Artificial Sequence
  Synthetic
cucacaugcccugggauga

SEQ ID NO: 349 - RNA, 19 nt, Artificial Sequence
  Synthetic
aguucccaagugcagggcc

SEQ ID NO: 350 - RNA, 19 nt, Artificial Sequence
  Synthetic
ccaaggaggcaccucccug

SEQ ID NO: 351 - RNA, 19 nt, Artificial Sequence
  Synthetic
ggggcaaggagcagccucu

SEQ ID NO: 352 - RNA, 19 nt, Artificial Sequence
  Synthetic
uccaccuggagccaagucc

SEQ ID NO: 353 - RNA, 19 nt, Artificial Sequence
  Synthetic
cuccugccagcccgaccca

SEQ ID NO: 354 - RNA, 19 nt, Artificial Sequence
  Synthetic
agaguccagacaaccugac

SEQ ID NO: 355 - RNA, 19 nt, Artificial Sequence
  Synthetic
cuugcacagagacgccccu

SEQ ID NO: 356 - RNA, 19 nt, Artificial Sequence
  Synthetic
ucgucaucgcaggcaaccc

SEQ ID NO: 357 - RNA, 19 nt, Artificial Sequence
  Synthetic
cugcuuaccgcagcuucag

SEQ ID NO: 358 - RNA, 19 nt, Artificial Sequence
  Synthetic
gcaacucccugagccaguc

SEQ ID NO: 359 - RNA, 19 nt, Artificial Sequence
  Synthetic
caccgugucccagagagcu

SEQ ID NO: 360 - RNA, 19 nt, Artificial Sequence
  Synthetic
uggguccagacccacugcu

SEQ ID NO: 361 - RNA, 19 nt, Artificial Sequence
  Synthetic
uggccagacaccuggagga

SEQ ID NO: 362 - RNA, 19 nt, Artificial Sequence
  Synthetic
aaguagaacccgagaugcc

SEQ ID NO: 363 - RNA, 19 nt, Artificial Sequence
  Synthetic
ccugugucccccagcucuc

SEQ ID NO: 364 - RNA, 19 nt, Artificial Sequence
  Synthetic
cugagccaaccacugugcc

SEQ ID NO: 365 - RNA, 19 nt, Artificial Sequence
  Synthetic
cccaaccugagccagaaac

SEQ ID NO: 366 - RNA, 19 nt, Artificial Sequence
  Synthetic
ccugggagcagauccuccg

SEQ ID NO: 367 - RNA, 19 nt, Artificial Sequence
  Synthetic
gccgaaauguccuccagca

SEQ ID NO: 368 - RNA, 19 nt, Artificial Sequence
  Synthetic
auggggcagcugcagcccc

SEQ ID NO: 369 - RNA, 19 nt, Artificial Sequence
  Synthetic
ccgucucggcccccaccag

SEQ ID NO: 370 - RNA, 19 nt, Artificial Sequence
  Synthetic
guggcuaucaggaguuugu

SEQ ID NO: 371 - RNA, 19 nt, Artificial Sequence
  Synthetic
uacaugcgguggagcaggg

SEQ ID NO: 372 - RNA, 19 nt, Artificial Sequence
  Synthetic
guggcacccaggccagugc

SEQ ID NO: 373 - RNA, 19 nt, Artificial Sequence
  Synthetic
cgguggugggcuugggucc

SEQ ID NO: 374 - RNA, 19 nt, Artificial Sequence
  Synthetic
ccccaggagaggcugguua

SEQ ID NO: 375 - RNA, 19 nt, Artificial Sequence
  Synthetic
acaaggccuucucaagccu

SEQ ID NO: 376 - RNA, 19 nt, Artificial Sequence
  Synthetic
ugcuugccagcagugcugu

SEQ ID NO: 377 - RNA, 19 nt, Artificial Sequence
  Synthetic
uguccccagagaaaugugg

SEQ ID NO: 378 - RNA, 19 nt, Artificial Sequence
  Synthetic
gguuuggggcuagcagugg

SEQ ID NO: 379 - RNA, 19 nt, Artificial Sequence
  Synthetic
gggaagagggguauaagcc

SEQ ID NO: 380 - RNA, 19 nt, Artificial Sequence
  Synthetic
cuuuccaagaccucauucc

SEQ ID NO: 381 - RNA, 19 nt, Artificial Sequence
  Synthetic
cuggcugcccuggggaccc

SEQ ID NO: 382 - RNA, 19 nt, Artificial Sequence
  Synthetic
cugccccagucccuguccc

SEQ ID NO: 383 - RNA, 19 nt, Artificial Sequence
  Synthetic
ccuuguucaccuuuggacu

SEQ ID NO: 384 - RNA, 19 nt, Artificial Sequence
  Synthetic
uggacagggagccaccucg

SEQ ID NO: 385 - RNA, 19 nt, Artificial Sequence
  Synthetic
gcaguccgcagagcucaca

SEQ ID NO: 386 - RNA, 19 nt, Artificial Sequence
  Synthetic
aucucccaagcagcucccc

SEQ ID NO: 387 - RNA, 19 nt, Artificial Sequence
  Synthetic
cagagcaccugggucugga

SEQ ID NO: 388 - RNA, 19 nt, Artificial Sequence
  Synthetic
agccgggggaaaagguaga

SEQ ID NO: 389 - RNA, 19 nt, Artificial Sequence
  Synthetic
aggacaugccaaagccccc

SEQ ID NO: 390 - RNA, 19 nt, Artificial Sequence
  Synthetic
cacuuccccaggagcaggc

SEQ ID NO: 391 - RNA, 19 nt, Artificial Sequence
  Synthetic
ccacagacccccuugugga

SEQ ID NO: 392 - RNA, 19 nt, Artificial Sequence
  Synthetic
acagccugggcaguggcau

SEQ ID NO: 393 - RNA, 19 nt, Artificial Sequence
  Synthetic
uugucuacucagcccuuac

SEQ ID NO: 394 - RNA, 19 nt, Artificial Sequence
  Synthetic
ccugccaccugugcggcca

SEQ ID NO: 395 - RNA, 19 nt, Artificial Sequence
  Synthetic
accugaaacagugucaugg

SEQ ID NO: 396 - RNA, 19 nt, Artificial Sequence
  Synthetic
gccaggaggaugguggcca

SEQ ID NO: 397 - RNA, 19 nt, Artificial Sequence
  Synthetic
agaccccugucauggccag

SEQ ID NO: 398 - RNA, 19 nt, Artificial Sequence
  Synthetic
guccuugcuguggcugcug

SEQ ID NO: 399 - RNA, 19 nt, Artificial Sequence
  Synthetic
gcuguggagacagguccuc

SEQ ID NO: 400 - RNA, 19 nt, Artificial Sequence
  Synthetic
cgcccccuacaaccccccu

SEQ ID NO: 401 - RNA, 19 nt, Artificial Sequence
  Synthetic
ugagggccccagaccccuc

SEQ ID NO: 402 - RNA, 19 nt, Artificial Sequence
  Synthetic
cuccaggugggguuccacu

SEQ ID NO: 403 - RNA, 19 nt, Artificial Sequence
  Synthetic
uggaggccagucugugucc

SEQ ID NO: 404 - RNA, 19 nt, Artificial Sequence
  Synthetic
cggccucccuggcacccuc

SEQ ID NO: 405 - RNA, 19 nt, Artificial Sequence
  Synthetic
cgggcaucucagagaagag

SEQ ID NO: 406 - RNA, 19 nt, Artificial Sequence
  Synthetic
guaaauccucaucauccuu

SEQ ID NO: 407 - RNA, 19 nt, Artificial Sequence
  Synthetic
uccauccugccccuggcaa

SEQ ID NO: 408 - RNA, 19 nt, Artificial Sequence
  Synthetic
augcucagagcucaagcca

SEQ ID NO: 409 - RNA, 19 nt, Artificial Sequence
  Synthetic
agacccccaaaaucgugaa

SEQ ID NO: 410 - RNA, 19 nt, Artificial Sequence
  Synthetic
acuuugucuccgugggacc

SEQ ID NO: 411 - RNA, 19 nt, Artificial Sequence
  Synthetic
ccacauacaugagggucuc

SEQ ID NO: 412 - RNA, 19 nt, Artificial Sequence
  Synthetic
cuuaggugcauguccucuu

SEQ ID NO: 413 - RNA, 19 nt, Artificial Sequence
  Synthetic
uguugcugagucugcagau

SEQ ID NO: 414 - RNA, 19 nt, Artificial Sequence
  Synthetic
ugaggacuagggcuuaucc

SEQ ID NO: 415 - RNA, 19 nt, Artificial Sequence
  Synthetic
caugccugggaaaugccac

SEQ ID NO: 416 - RNA, 19 nt, Artificial Sequence
  Synthetic
ccuccuggaaggcagccag

SEQ ID NO: 417 - RNA, 19 nt, Artificial Sequence
  Synthetic
ggcuggcagauuuccaaaa

SEQ ID NO: 418 - RNA, 19 nt, Artificial Sequence
  Synthetic
agacuugaagaaccauggu

SEQ ID NO: 419 - RNA, 19 nt, Artificial Sequence
  Synthetic
uaugaaggugauuggcccc

SEQ ID NO: 420 - RNA, 19 nt, Artificial Sequence
  Synthetic
cacugacguuggccuaaca

SEQ ID NO: 421 - RNA, 19 nt, Artificial Sequence
  Synthetic
acugggcugcagagacugg

SEQ ID NO: 422 - RNA, 19 nt, Artificial Sequence
  Synthetic
gaccccgcccagcauuggg

SEQ ID NO: 423 - RNA, 19 nt, Artificial Sequence
  Synthetic
gcugggcucgccacauccc

SEQ ID NO: 424 - RNA, 19 nt, Artificial Sequence
  Synthetic
caugagaguagagggcacu

SEQ ID NO: 425 - RNA, 19 nt, Artificial Sequence
  Synthetic
ugggucgccgugccccacg

SEQ ID NO: 426 - RNA, 19 nt, Artificial Sequence
  Synthetic
ggcaggccccugcaggaaa

SEQ ID NO: 427 - RNA, 19 nt, Artificial Sequence
  Synthetic
aacugaggcccuugggcac

SEQ ID NO: 428 - RNA, 19 nt, Artificial Sequence
  Synthetic
ccucgacuugugaacgagu

SEQ ID NO: 429 - RNA, 19 nt, Artificial Sequence
  Synthetic
uuguuggcugcucccucca

SEQ ID NO: 430 - RNA, 19 nt, Artificial Sequence
  Synthetic
acagcuucugcagcagacu

SEQ ID NO: 431 - RNA, 19 nt, Artificial Sequence
  Synthetic
ugucccuguuguaacugcc

SEQ ID NO: 432 - RNA, 19 nt, Artificial Sequence
  Synthetic
ccaaggcauguuuugccca

SEQ ID NO: 433 - RNA, 19 nt, Artificial Sequence
  Synthetic
accagaucauggcccacgu

SEQ ID NO: 434 - RNA, 19 nt, Artificial Sequence
  Synthetic
uggaggcccaccugccucu

SEQ ID NO: 435 - RNA, 19 nt, Artificial Sequence
  Synthetic
ugucucacugaacuagaag

SEQ ID NO: 436 - RNA, 19 nt, Artificial Sequence
  Synthetic
gccgagccuagaaacuaac

SEQ ID NO: 437 - RNA, 19 nt, Artificial Sequence
  Synthetic
cacagccaucaagggaaug

SEQ ID NO: 438 - RNA, 19 nt, Artificial Sequence
  Synthetic
gacuugggcggccuuggga

SEQ ID NO: 439 - RNA, 19 nt, Artificial Sequence
  Synthetic
aaaucgaugagaaauugaa

SEQ ID NO: 440 - RNA, 19 nt, Artificial Sequence
  Synthetic
acuucagggagggugguca

SEQ ID NO: 441 - RNA, 19 nt, Artificial Sequence
  Synthetic
auugccuagaggugcucau

SEQ ID NO: 442 - RNA, 19 nt, Artificial Sequence
  Synthetic
uucauuuaacagagcuucc

SEQ ID NO: 443 - RNA, 19 nt, Artificial Sequence
  Synthetic
cuuagguugaugcuggagg

SEQ ID NO: 444 - RNA, 19 nt, Artificial Sequence
  Synthetic
gcagaaucccggcugucaa

SEQ ID NO: 445 - RNA, 19 nt, Artificial Sequence
  Synthetic
agggguguucaguuaaggg

SEQ ID NO: 446 - RNA, 19 nt, Artificial Sequence
  Synthetic
ggagcaacagaggacauga

SEQ ID NO: 447 - RNA, 19 nt, Artificial Sequence
  Synthetic
aaaaauugcuaugacuaaa

SEQ ID NO: 448 - RNA, 19 nt, Artificial Sequence
  Synthetic
agcagggacaauuugcugc

SEQ ID NO: 449 - RNA, 19 nt, Artificial Sequence
  Synthetic
ccaaacacccaugcccagc

SEQ ID NO: 450 - RNA, 19 nt, Artificial Sequence
  Synthetic
cuguauggcugggggcucc

SEQ ID NO: 451 - RNA, 19 nt, Artificial Sequence
  Synthetic
cucguaugcauggaacccc

SEQ ID NO: 452 - RNA, 19 nt, Artificial Sequence
  Synthetic
ccagaauaaauaugcucag

SEQ ID NO: 453 - RNA, 19 nt, Artificial Sequence
  Synthetic
gccacccugugggccgggc

SEQ ID NO: 454 - RNA, 19 nt, Artificial Sequence
  Synthetic
caauccagacagcaggcau

SEQ ID NO: 455 - RNA, 19 nt, Artificial Sequence
  Synthetic
uaaggcaccaguuacccug

SEQ ID NO: 456 - RNA, 19 nt, Artificial Sequence
  Synthetic
gcauguuggcccagaccuc

SEQ ID NO: 457 - RNA, 19 nt, Artificial Sequence
  Synthetic
caggugcuagggaaggcgg

SEQ ID NO: 458 - RNA, 19 nt, Artificial Sequence
  Synthetic
ggaaccuuggguugaguaa

SEQ ID NO: 459 - RNA, 19 nt, Artificial Sequence
  Synthetic
augcucgucuguguguuuu

SEQ ID NO: 460 - RNA, 19 nt, Artificial Sequence
  Synthetic
uaguuucaucaccuguuau

SEQ ID NO: 461 - RNA, 19 nt, Artificial Sequence
  Synthetic
ucuguguuugcugaggaga

SEQ ID NO: 462 - RNA, 19 nt, Artificial Sequence
  Synthetic
aguggaacagaaggggugg

SEQ ID NO: 463 - RNA, 19 nt, Artificial Sequence
  Synthetic
gaguuuuguauaaauaaag

SEQ ID NO: 464 - RNA, 19 nt, Artificial Sequence
  Synthetic
uaaauaaaguuucuuuguc

SEQ ID NO: 465 - RNA, 19 nt, Artificial Sequence
  Synthetic
cgcgccccugcuccauucg

SEQ ID NO: 466 - RNA, 19 nt, Artificial Sequence
  Synthetic
uaaaucuuuaauuaucugc

SEQ ID NO: 467 - RNA, 19 nt, Artificial Sequence
  Synthetic
auuucuuccagcugugugu

SEQ ID NO: 468 - RNA, 19 nt, Artificial Sequence
  Synthetic
acgcccggcuucucuauga

SEQ ID NO: 469 - RNA, 19 nt, Artificial Sequence
  Synthetic
uuauaggcaugagccacca

SEQ ID NO: 470 - RNA, 19 nt, Artificial Sequence
  Synthetic
ccuccaaaagugcugggau

SEQ ID NO: 471 - RNA, 19 nt, Artificial Sequence
  Synthetic
gugaucugcccgccucagc

SEQ ID NO: 472 - RNA, 19 nt, Artificial Sequence
  Synthetic
ucgaacuccugaucucaag

SEQ ID NO: 473 - RNA, 19 nt, Artificial Sequence
  Synthetic
caaggcaccaggcuggucu

SEQ ID NO: 474 - RNA, 19 nt, Artificial Sequence
  Synthetic
caccccauugggagaugcc

SEQ ID NO: 475 - RNA, 19 nt, Artificial Sequence
  Synthetic
aggagcccagagcaaagcc

SEQ ID NO: 476 - RNA, 19 nt, Artificial Sequence
  Synthetic
aggcagcucacagggaaca

SEQ ID NO: 477 - RNA, 19 nt, Artificial Sequence
  Synthetic
gccaccugcagcaggacca

SEQ ID NO: 478 - RNA, 19 nt, Artificial Sequence
  Synthetic
uucauguucccagagcuug

SEQ ID NO: 479 - RNA, 19 nt, Artificial Sequence
  Synthetic
gugggcuccugcaagaccu

SEQ ID NO: 480 - RNA, 19 nt, Artificial Sequence
  Synthetic
auguagucggagacgcagg

SEQ ID NO: 481 - RNA, 19 nt, Artificial Sequence
  Synthetic
ucgcaaguagagaugcuca

SEQ ID NO: 482 - RNA, 19 nt, Artificial Sequence
  Synthetic
ggaccauucaucuuccacu

SEQ ID NO: 483 - RNA, 19 nt, Artificial Sequence
  Synthetic
ucggugcugcaauuggugg

SEQ ID NO: 484 - RNA, 19 nt, Artificial Sequence
  Synthetic
ugguacaacaggcggagcu

SEQ ID NO: 485 - RNA, 19 nt, Artificial Sequence
  Synthetic
gagagcagaaaaaccagcu

SEQ ID NO: 486 - RNA, 19 nt, Artificial Sequence
  Synthetic
auacacgugugggcuucgg

SEQ ID NO: 487 - RNA, 19 nt, Artificial Sequence
  Synthetic
ccuccguuguucucaggga

SEQ ID NO: 488 - RNA, 19 nt, Artificial Sequence
  Synthetic
uggcacacgcaccccgcgc

SEQ ID NO: 489 - RNA, 19 nt, Artificial Sequence
  Synthetic
acgucauccaugagcaggu

SEQ ID NO: 490 - RNA, 19 nt, Artificial Sequence
  Synthetic
uaguuauccgcacugacca

SEQ ID NO: 491 - RNA, 19 nt, Artificial Sequence
  Synthetic
gcccacagguccaguguau

SEQ ID NO: 492 - RNA, 19 nt, Artificial Sequence
  Synthetic
cacagcagcugcugcccag

SEQ ID NO: 493 - RNA, 19 nt, Artificial Sequence
  Synthetic
ggcuugaaggagcccuucc

SEQ ID NO: 494 - RNA, 19 nt, Artificial Sequence
  Synthetic
gguuucacaugcucgcugg

SEQ ID NO: 495 - RNA, 19 nt, Artificial Sequence
  Synthetic
agguuuccuggggcccugg

SEQ ID NO: 496 - RNA, 19 nt, Artificial Sequence
  Synthetic
acauuggugugaacuguca

SEQ ID NO: 497 - RNA, 19 nt, Artificial Sequence
  Synthetic
agcagcagagugucggaga

SEQ ID NO: 498 - RNA, 19 nt, Artificial Sequence
  Synthetic
uacggguugcuccagguca

SEQ ID NO: 499 - RNA, 19 nt, Artificial Sequence
  Synthetic
agguaauugucagggggau

SEQ ID NO: 500 - RNA, 19 nt, Artificial Sequence
  Synthetic
uaggugagaugauuauaca

SEQ ID NO: 501 - RNA, 19 nt, Artificial Sequence
  Synthetic
cuccaaauguugacugcau

SEQ ID NO: 502 - RNA, 19 nt, Artificial Sequence
  Synthetic
ucugccgggucguuuucac

SEQ ID NO: 503 - RNA, 19 nt, Artificial Sequence
  Synthetic
acguuauagauucugaaau

SEQ ID NO: 504 - RNA, 19 nt, Artificial Sequence
  Synthetic
gaggguucuagguagguca

SEQ ID NO: 505 - RNA, 19 nt, Artificial Sequence
  Synthetic
cuggcugcgaugcggaggg

SEQ ID NO: 506 - RNA, 19 nt, Artificial Sequence
  Synthetic
aucccagacuucagggugc

SEQ ID NO: 507 - RNA, 19 nt, Artificial Sequence
  Synthetic
acccgugcccuguaggaaa

SEQ ID NO: 508 - RNA, 19 nt, Artificial Sequence
  Synthetic
cacugagcccaggcccuca

SEQ ID NO: 509 - RNA, 19 nt, Artificial Sequence
  Synthetic
cuccaggugguguuauagc

SEQ ID NO: 510 - RNA, 19 nt, Artificial Sequence
  Synthetic
gugcuggggcuccacucac

SEQ ID NO: 511 - RNA, 19 nt, Artificial Sequence
  Synthetic
uaggaguugugccacuugg

SEQ ID NO: 512 - RNA, 19 nt, Artificial Sequence
  Synthetic
ugcucgaagggcucccugu

SEQ ID NO: 513 - RNA, 19 nt, Artificial Sequence
  Synthetic
acgcccagcaggaggugcu

SEQ ID NO: 514 - RNA, 19 nt, Artificial Sequence
  Synthetic
acaaugcaggaaacgcuga

SEQ ID NO: 515 - RNA, 19 nt, Artificial Sequence
  Synthetic
aggcagacggccaggauga

SEQ ID NO: 516 - RNA, 19 nt, Artificial Sequence
  Synthetic
augcugacauagcacaaca

SEQ ID NO: 517 - RNA, 19 nt, Artificial Sequence
  Synthetic
ucuuucuuaaucuugguga

SEQ ID NO: 518 - RNA, 19 nt, Artificial Sequence
  Synthetic
ggaaucugaucccaccauu

SEQ ID NO: 519 - RNA, 19 nt, Artificial Sequence
  Synthetic
cggcugcgggcuggguugg

SEQ ID NO: 520 - RNA, 19 nt, Artificial Sequence
  Synthetic
auuauuauagccacgaggc

SEQ ID NO: 521 - RNA, 19 nt, Artificial Sequence
  Synthetic
gaccccugagcauccugga

SEQ ID NO: 522 - RNA, 19 nt, Artificial Sequence
  Synthetic
gaccgcuucucccacugug

SEQ ID NO: 523 - RNA, 19 nt, Artificial Sequence
  Synthetic
gcugguuccuggccucggg

SEQ ID NO: 524 - RNA, 19 nt, Artificial Sequence
  Synthetic
uuccagugugggcacuugg

SEQ ID NO: 525 - RNA, 19 nt, Artificial Sequence
  Synthetic
agcuugguaagacaauucu

SEQ ID NO: 526 - RNA, 19 nt, Artificial Sequence
  Synthetic
uccagaaaacagggcaaga

SEQ ID NO: 527 - RNA, 19 nt, Artificial Sequence
  Synthetic
ucccuuuucauguugugcu

SEQ ID NO: 528 - RNA, 19 nt, Artificial Sequence
  Synthetic
gccuugugaggaucuucau

SEQ ID NO: 529 - RNA, 19 nt, Artificial Sequence
  Synthetic
aaaggcaucucuuuggcag

SEQ ID NO: 530 - RNA, 19 nt, Artificial Sequence
  Synthetic
gauuuuccagagcccugga

SEQ ID NO: 531 - RNA, 19 nt, Artificial Sequence
  Synthetic
uccacugggcaccaugcug

SEQ ID NO: 532 - RNA, 19 nt, Artificial Sequence
  Synthetic
aggacugucuugcugaucu

SEQ ID NO: 533 - RNA, 19 nt, Artificial Sequence
  Synthetic
cugaugcucucuggccaga

SEQ ID NO: 534 - RNA, 19 nt, Artificial Sequence
  Synthetic
uccacacaucgcaccacgc

SEQ ID NO: 535 - RNA, 19 nt, Artificial Sequence
  Synthetic
accggggccucaaacaacu

SEQ ID NO: 536 - RNA, 19 nt, Artificial Sequence
  Synthetic
uccuccuccucacacucca

SEQ ID NO: 537 - RNA, 19 nt, Artificial Sequence
  Synthetic
uuuucuuccucuaccuccu

SEQ ID NO: 538 - RNA, 19 nt, Artificial Sequence
  Synthetic
gaugcacagaagcucccuu

SEQ ID NO: 539 - RNA, 19 nt, Artificial Sequence
  Synthetic
ucccugcugcucucaggcg

SEQ ID NO: 540 - RNA, 19 nt, Artificial Sequence
  Synthetic
cuucccuccuggaagucau

SEQ ID NO: 541 - RNA, 19 nt, Artificial Sequence
  Synthetic
cgggccacaaugcccuccc

SEQ ID NO: 542 - RNA, 19 nt, Artificial Sequence
  Synthetic
aacaggcucucuguuagcc

SEQ ID NO: 543 - RNA, 19 nt, Artificial Sequence
  Synthetic
ucuccgagcagguccagga

SEQ ID NO: 544 - RNA, 19 nt, Artificial Sequence
  Synthetic
caaaagcccccauucuccu

SEQ ID NO: 545 - RNA, 19 nt, Artificial Sequence
  Synthetic
ucccccauguccugcuggc

SEQ ID NO: 546 - RNA, 19 nt, Artificial Sequence
  Synthetic
gguggaagaaggcaugacu

SEQ ID NO: 547 - RNA, 19 nt, Artificial Sequence
  Synthetic
gcacucguacuucccgaag

SEQ ID NO: 548 - RNA, 19 nt, Artificial Sequence
  Synthetic
ucaucccagggcaugugag

SEQ ID NO: 549 - RNA, 19 nt, Artificial Sequence
  Synthetic
ggcccugcacuugggaacu

SEQ ID NO: 550 - RNA, 19 nt, Artificial Sequence
  Synthetic
cagggaggugccuccuugg

SEQ ID NO: 551 - RNA, 19 nt, Artificial Sequence
  Synthetic
agaggcugcuccuugcccc

SEQ ID NO: 552 - RNA, 19 nt, Artificial Sequence
  Synthetic
ggacuuggcuccaggugga

SEQ ID NO: 553 - RNA, 19 nt, Artificial Sequence
  Synthetic
ugggucgggcuggcaggag

SEQ ID NO: 554 - RNA, 19 nt, Artificial Sequence
  Synthetic
gucagguugucuggacucu

SEQ ID NO: 555 - RNA, 19 nt, Artificial Sequence
  Synthetic
aggggcgucucugugcaag

SEQ ID NO: 556 - RNA, 19 nt, Artificial Sequence
  Synthetic
ggguugccugcgaugacga

SEQ ID NO: 557 - RNA, 19 nt, Artificial Sequence
  Synthetic
cugaagcugcgguaagcag

SEQ ID NO: 558 - RNA, 19 nt, Artificial Sequence
  Synthetic
gacuggcucagggaguugc

SEQ ID NO: 559 - RNA, 19 nt, Artificial Sequence
  Synthetic
agcucucugggacacggug

SEQ ID NO: 560 - RNA, 19 nt, Artificial Sequence
  Synthetic
agcagugggucuggaccca

SEQ ID NO: 561 - RNA, 19 nt, Artificial Sequence
  Synthetic
uccuccaggugucuggcca

SEQ ID NO: 562 - RNA, 19 nt, Artificial Sequence
  Synthetic
ggcaucucggguucuacuu

SEQ ID NO: 563 - RNA, 19 nt, Artificial Sequence
  Synthetic
gagagcugggggacacagg

SEQ ID NO: 564 - RNA, 19 nt, Artificial Sequence
  Synthetic
ggcacagugguuggcucag

SEQ ID NO: 565 - RNA, 19 nt, Artificial Sequence
  Synthetic
guuucuggcucagguuggg

SEQ ID NO: 566 - RNA, 19 nt, Artificial Sequence
  Synthetic
cggaggaucugcucccagg

SEQ ID NO: 567 - RNA, 19 nt, Artificial Sequence
  Synthetic
ugcuggaggacauuucggc

SEQ ID NO: 568 - RNA, 19 nt, Artificial Sequence
  Synthetic
ggggcugcagcugccccau

SEQ ID NO: 569 - RNA, 19 nt, Artificial Sequence
  Synthetic
cuggugggggccgagacgg

SEQ ID NO: 570 - RNA, 19 nt, Artificial Sequence
  Synthetic
acaaacuccugauagccac

SEQ ID NO: 571 - RNA, 19 nt, Artificial Sequence
  Synthetic
cccugcuccaccgcaugua

SEQ ID NO: 572 - RNA, 19 nt, Artificial Sequence
  Synthetic
gcacuggccugggugccac

SEQ ID NO: 573 - RNA, 19 nt, Artificial Sequence
  Synthetic
ggacccaagcccaccaccg

SEQ ID NO: 574 - RNA, 19 nt, Artificial Sequence
  Synthetic
uaaccagccucuccugggg

SEQ ID NO: 575 - RNA, 19 nt, Artificial Sequence
  Synthetic
aggcuugagaaggccuugu

SEQ ID NO: 576 - RNA, 19 nt, Artificial Sequence
  Synthetic
acagcacugcuggcaagca

SEQ ID NO: 577 - RNA, 19 nt, Artificial Sequence
  Synthetic
ccacauuucucuggggaca

SEQ ID NO: 578 - RNA, 19 nt, Artificial Sequence
  Synthetic
ccacugcuagccccaaacc

SEQ ID NO: 579 - RNA, 19 nt, Artificial Sequence
  Synthetic
ggcuuauaccccucuuccc

SEQ ID NO: 580 - RNA, 19 nt, Artificial Sequence
  Synthetic
ggaaugaggucuuggaaag

SEQ ID NO: 581 - RNA, 19 nt, Artificial Sequence
  Synthetic
ggguccccagggcagccag

SEQ ID NO: 582 - RNA, 19 nt, Artificial Sequence
  Synthetic
gggacagggacuggggcag

SEQ ID NO: 583 - RNA, 19 nt, Artificial Sequence
  Synthetic
aguccaaaggugaacaagg

SEQ ID NO: 584 - RNA, 19 nt, Artificial Sequence
  Synthetic
cgagguggcucccugucca

SEQ ID NO: 585 - RNA, 19 nt, Artificial Sequence
  Synthetic
ugugagcucugcggacugc

SEQ ID NO: 586 - RNA, 19 nt, Artificial Sequence
  Synthetic
ggggagcugcuugggagau

SEQ ID NO: 587 - RNA, 19 nt, Artificial Sequence
  Synthetic
uccagacccaggugcucug

SEQ ID NO: 588 - RNA, 19 nt, Artificial Sequence
  Synthetic
ucuaccuuuucccccggcu

SEQ ID NO: 589 - RNA, 19 nt, Artificial Sequence
  Synthetic
gggggcuuuggcauguccu

SEQ ID NO: 590 - RNA, 19 nt, Artificial Sequence
  Synthetic
gccugcuccuggggaagug

SEQ ID NO: 591 - RNA, 19 nt, Artificial Sequence
  Synthetic
uccacaagggggucugugg

SEQ ID NO: 592 - RNA, 19 nt, Artificial Sequence
  Synthetic
augccacugcccaggcugu

SEQ ID NO: 593 - RNA, 19 nt, Artificial Sequence
  Synthetic
guaagggcugaguagacaa

SEQ ID NO: 594 - RNA, 19 nt, Artificial Sequence
  Synthetic
uggccgcacagguggcagg

SEQ ID NO: 595 - RNA, 19 nt, Artificial Sequence
  Synthetic
ccaugacacuguuucaggu

SEQ ID NO: 596 - RNA, 19 nt, Artificial Sequence
  Synthetic
uggccaccauccuccuggc

SEQ ID NO: 597 - RNA, 19 nt, Artificial Sequence
  Synthetic
cuggccaugacaggggucu

SEQ ID NO: 598 - RNA, 19 nt, Artificial Sequence
  Synthetic
cagcagccacagcaaggac

SEQ ID NO: 599 - RNA, 19 nt, Artificial Sequence
  Synthetic
gaggaccugucuccacagc

SEQ ID NO: 600 - RNA, 19 nt, Artificial Sequence
  Synthetic
agggggguuguagggggcg

SEQ ID NO: 601 - RNA, 19 nt, Artificial Sequence
  Synthetic
gaggggucuggggcccuca

SEQ ID NO: 602 - RNA, 19 nt, Artificial Sequence
  Synthetic
aguggaaccccaccuggag

SEQ ID NO: 603 - RNA, 19 nt, Artificial Sequence
  Synthetic
ggacacagacuggccucca

SEQ ID NO: 604 - RNA, 19 nt, Artificial Sequence
  Synthetic
gagggugccagggaggccg

SEQ ID NO: 605 - RNA, 19 nt, Artificial Sequence
  Synthetic
cucuucucugagaugcccg

SEQ ID NO: 606 - RNA, 19 nt, Artificial Sequence
  Synthetic
aaggaugaugaggauuuac

SEQ ID NO: 607 - RNA, 19 nt, Artificial Sequence
  Synthetic
uugccaggggcaggaugga

SEQ ID NO: 608 - RNA, 19 nt, Artificial Sequence
  Synthetic
uggcuugagcucugagcau

SEQ ID NO: 609 - RNA, 19 nt, Artificial Sequence
  Synthetic
uucacgauuuugggggucu

SEQ ID NO: 610 - RNA, 19 nt, Artificial Sequence
  Synthetic
ggucccacggagacaaagu

SEQ ID NO: 611 - RNA, 19 nt, Artificial Sequence
  Synthetic
gagacccucauguaugugg

SEQ ID NO: 612 - RNA, 19 nt, Artificial Sequence
  Synthetic
aagaggacaugcaccuaag

SEQ ID NO: 613 - RNA, 19 nt, Artificial Sequence
  Synthetic
aucugcagacucagcaaca

SEQ ID NO: 614 - RNA, 19 nt, Artificial Sequence
  Synthetic
ggauaagcccuaguccuca

SEQ ID NO: 615 - RNA, 19 nt, Artificial Sequence
  Synthetic
guggcauuucccaggcaug

SEQ ID NO: 616 - RNA, 19 nt, Artificial Sequence
  Synthetic
cuggcugccuuccaggagg

SEQ ID NO: 617 - RNA, 19 nt, Artificial Sequence
  Synthetic
uuuuggaaaucugccagcc

SEQ ID NO: 618 - RNA, 19 nt, Artificial Sequence
  Synthetic
accaugguucuucaagucu

SEQ ID NO: 619 - RNA, 19 nt, Artificial Sequence
  Synthetic
ggggccaaucaccuucaua

SEQ ID NO: 620 - RNA, 19 nt, Artificial Sequence
  Synthetic
uguuaggccaacgucagug

SEQ ID NO: 621 - RNA, 19 nt, Artificial Sequence
  Synthetic
ccagucucugcagcccagu

SEQ ID NO: 622 - RNA, 19 nt, Artificial Sequence
  Synthetic
cccaaugcugggcgggguc

SEQ ID NO: 623 - RNA, 19 nt, Artificial Sequence
  Synthetic
gggauguggcgagcccagc

SEQ ID NO: 624 - RNA, 19 nt, Artificial Sequence
  Synthetic
agugcccucuacucucaug

SEQ ID NO: 625 - RNA, 19 nt, Artificial Sequence
  Synthetic
cguggggcacggcgaccca

SEQ ID NO: 626 - RNA, 19 nt, Artificial Sequence
  Synthetic
uuuccugcaggggccugcc

SEQ ID NO: 627 - RNA, 19 nt, Artificial Sequence
  Synthetic
gugcccaagggccucaguu

SEQ ID NO: 628 - RNA, 19 nt, Artificial Sequence
  Synthetic
acucguucacaagucgagg

SEQ ID NO: 629 - RNA, 19 nt, Artificial Sequence
  Synthetic
uggagggagcagccaacaa

SEQ ID NO: 630 - RNA, 19 nt, Artificial Sequence
  Synthetic
agucugcugcagaagcugu

SEQ ID NO: 631 - RNA, 19 nt, Artificial Sequence
  Synthetic
ggcaguuacaacagggaca

SEQ ID NO: 632 - RNA, 19 nt, Artificial Sequence
  Synthetic
ugggcaaaacaugccuugg

SEQ ID NO: 633 - RNA, 19 nt, Artificial Sequence
  Synthetic
acgugggccaugaucuggu

SEQ ID NO: 634 - RNA, 19 nt, Artificial Sequence
  Synthetic
agaggcaggugggccucca

SEQ ID NO: 635 - RNA, 19 nt, Artificial Sequence
  Synthetic
cuucuaguucagugagaca

SEQ ID NO: 636 - RNA, 19 nt, Artificial Sequence
  Synthetic
guuaguuucuaggcucggc

SEQ ID NO: 637 - RNA, 19 nt, Artificial Sequence
  Synthetic
cauucccuugauggcugug

SEQ ID NO: 638 - RNA, 19 nt, Artificial Sequence
  Synthetic
ucccaaggccgcccaaguc

SEQ ID NO: 639 - RNA, 19 nt, Artificial Sequence
  Synthetic
uucaauuucucaucgauuu

SEQ ID NO: 640 - RNA, 19 nt, Artificial Sequence
  Synthetic
ugaccacccucccugaagu

SEQ ID NO: 641 - RNA, 19 nt, Artificial Sequence
  Synthetic
augagcaccucuaggcaau

SEQ ID NO: 642 - RNA, 19 nt, Artificial Sequence
  Synthetic
ggaagcucuguuaaaugaa

SEQ ID NO: 643 - RNA, 19 nt, Artificial Sequence
  Synthetic
ccuccagcaucaaccuaag

SEQ ID NO: 644 - RNA, 19 nt, Artificial Sequence
  Synthetic
uugacagccgggauucugc

SEQ ID NO: 645 - RNA, 19 nt, Artificial Sequence
  Synthetic
cccuuaacugaacaccccu

SEQ ID NO: 646 - RNA, 19 nt, Artificial Sequence
  Synthetic
ucauguccucuguugcucc

SEQ ID NO: 647 - RNA, 19 nt, Artificial Sequence
  Synthetic
uuuagucauagcaauuuuu

SEQ ID NO: 648 - RNA, 19 nt, Artificial Sequence
  Synthetic
gcagcaaauugucccugcu

SEQ ID NO: 649 - RNA, 19 nt, Artificial Sequence
  Synthetic
gcugggcauggguguuugg

SEQ ID NO: 650 - RNA, 19 nt, Artificial Sequence
  Synthetic
ggagcccccagccauacag

SEQ ID NO: 651 - RNA, 19 nt, Artificial Sequence
  Synthetic
gggguuccaugcauacgag

SEQ ID NO: 652 - RNA, 19 nt, Artificial Sequence
  Synthetic
cugagcauauuuauucugg

SEQ ID NO: 653 - RNA, 19 nt, Artificial Sequence
  Synthetic
gcccggcccacaggguggc

SEQ ID NO: 654 - RNA, 19 nt, Artificial Sequence
  Synthetic
augccugcugucuggauug

SEQ ID NO: 655 - RNA, 19 nt, Artificial Sequence
  Synthetic
caggguaacuggugccuua

SEQ ID NO: 656 - RNA, 19 nt, Artificial Sequence
  Synthetic
gaggucugggccaacaugc

SEQ ID NO: 657 - RNA, 19 nt, Artificial Sequence
  Synthetic
ccgccuucccuagcaccug

SEQ ID NO: 658 - RNA, 19 nt, Artificial Sequence
  Synthetic
uuacucaacccaagguucc

SEQ ID NO: 659 - RNA, 19 nt, Artificial Sequence
  Synthetic
aaaacacacagacgagcau

SEQ ID NO: 660 - RNA, 19 nt, Artificial Sequence
  Synthetic
auaacaggugaugaaacua

SEQ ID NO: 661 - RNA, 19 nt, Artificial Sequence
  Synthetic
ucuccucagcaaacacaga

SEQ ID NO: 662 - RNA, 19 nt, Artificial Sequence
  Synthetic
ccaccccuucuguuccacu

SEQ ID NO: 663 - RNA, 19 nt, Artificial Sequence
  Synthetic
cuuuauuuauacaaaacuc

SEQ ID NO: 664 - RNA, 19 nt, Artificial Sequence
  Synthetic
gacaaagaaacuuuauuua

SEQ ID NO: 665 - RNA, 19 nt, Artificial Sequence
  Synthetic
gccacccagccuaugcauc

SEQ ID NO: 666 - RNA, 19 nt, Artificial Sequence
  Synthetic
ccgcuccucaauccucucc

SEQ ID NO: 667 - RNA, 19 nt, Artificial Sequence
  Synthetic
cuguuggcacugggccuca

SEQ ID NO: 668 - RNA, 19 nt, Artificial Sequence
  Synthetic
auggcgcuuuuguugacca

SEQ ID NO: 669 - RNA, 19 nt, Artificial Sequence
  Synthetic
acggucauugcucucacuu

SEQ ID NO: 670 - RNA, 19 nt, Artificial Sequence
  Synthetic
ugccuuggcggcuuugccu

SEQ ID NO: 671 - RNA, 19 nt, Artificial Sequence
  Synthetic
uccccaggcccugugccuc

SEQ ID NO: 672 - RNA, 19 nt, Artificial Sequence
  Synthetic
cccucuacagcccucaggg

SEQ ID NO: 673 - RNA, 19 nt, Artificial Sequence
  Synthetic
gagcucauugaggagcugg

SEQ ID NO: 674 - RNA, 19 nt, Artificial Sequence
  Synthetic
gucaacaucacccagaacc

SEQ ID NO: 675 - RNA, 19 nt, Artificial Sequence
  Synthetic
cagaaggcuccgcucugca

SEQ ID NO: 676 - RNA, 19 nt, Artificial Sequence
  Synthetic
aauggcagcaugguaugga

SEQ ID NO: 677 - RNA, 19 nt, Artificial Sequence
  Synthetic
agcaucaaccugacagcug

SEQ ID NO: 678 - RNA, 19 nt, Artificial Sequence
  Synthetic
ggcauguacugugcagccc

SEQ ID NO: 679 - RNA, 19 nt, Artificial Sequence
  Synthetic
cuggaaucccugaucaacg

SEQ ID NO: 680 - RNA, 19 nt, Artificial Sequence
  Synthetic
gugucaggcugcagugcca

SEQ ID NO: 681 - RNA, 19 nt, Artificial Sequence
  Synthetic
aucgagaagacccagagga

SEQ ID NO: 682 - RNA, 19 nt, Artificial Sequence
  Synthetic
augcugagcggauucugcc

SEQ ID NO: 683 - RNA, 19 nt, Artificial Sequence
  Synthetic
ccgcacaaggucucagcug

SEQ ID NO: 684 - RNA, 19 nt, Artificial Sequence
  Synthetic
gggcaguuuuccagcuugc

SEQ ID NO: 685 - RNA, 19 nt, Artificial Sequence
  Synthetic
cauguccgagacaccaaaa

SEQ ID NO: 686 - RNA, 19 nt, Artificial Sequence
  Synthetic
aucgagguggcccaguuug

SEQ ID NO: 687 - RNA, 19 nt, Artificial Sequence
  Synthetic
guaaaggaccugcucuuac

SEQ ID NO: 688 - RNA, 19 nt, Artificial Sequence
  Synthetic
cauuuaaagaaacuuuuuc

SEQ ID NO: 689 - RNA, 19 nt, Artificial Sequence
  Synthetic
cgcgagggacaguucaacu

SEQ ID NO: 690 - RNA, 19 nt, Artificial Sequence
  Synthetic
ugaaacuucgaaagcauca

SEQ ID NO: 691 - RNA, 19 nt, Artificial Sequence
  Synthetic
auuauuugcagagacagga

SEQ ID NO: 692 - RNA, 19 nt, Artificial Sequence
  Synthetic
accugacuauugaaguugc

SEQ ID NO: 693 - RNA, 19 nt, Artificial Sequence
  Synthetic
cagauucauuuuucuuucu

SEQ ID NO: 694 - RNA, 19 nt, Artificial Sequence
  Synthetic
ugaugucaaaaaugucuug

SEQ ID NO: 695 - RNA, 19 nt, Artificial Sequence
  Synthetic
ggguaggcgggaaggaggg

SEQ ID NO: 696 - RNA, 19 nt, Artificial Sequence
  Synthetic
guuagggagggguaaaauu

SEQ ID NO: 697 - RNA, 19 nt, Artificial Sequence
  Synthetic
uccuuagcuuagaccucag

SEQ ID NO: 698 - RNA, 19 nt, Artificial Sequence
  Synthetic
gccugugcugcccgucuuc

SEQ ID NO: 699 - RNA, 19 nt, Artificial Sequence
  Synthetic
cagccuagccgaccucagc

SEQ ID NO: 700 - RNA, 19 nt, Artificial Sequence
  Synthetic
ccuuccccuugcccagggc

SEQ ID NO: 701 - RNA, 19 nt, Artificial Sequence
  Synthetic
cucagccuggugggccucc

SEQ ID NO: 702 - RNA, 19 nt, Artificial Sequence
  Synthetic
cucuguccagggcccugag

SEQ ID NO: 703 - RNA, 19 nt, Artificial Sequence
  Synthetic
gcucgguggacccagggau

SEQ ID NO: 704 - RNA, 19 nt, Artificial Sequence
  Synthetic
ugacaugucccuacacccc

SEQ ID NO: 705 - RNA, 19 nt, Artificial Sequence
  Synthetic
cuccccugcccuagagcac

SEQ ID NO: 706 - RNA, 19 nt, Artificial Sequence
  Synthetic
cacuguagcauuacagugg

SEQ ID NO: 707 - RNA, 19 nt, Artificial Sequence
  Synthetic
ggugccccccuugccagac

SEQ ID NO: 708 - RNA, 19 nt, Artificial Sequence
  Synthetic
cauguggugggacagggac

SEQ ID NO: 709 - RNA, 19 nt, Artificial Sequence
  Synthetic
cccacuucacacacaggca

SEQ ID NO: 710 - RNA, 19 nt, Artificial Sequence
  Synthetic
aacugaggcagacagcagc

SEQ ID NO: 711 - RNA, 19 nt, Artificial Sequence
  Synthetic
cucaggcacacuucuucuu

SEQ ID NO: 712 - RNA, 19 nt, Artificial Sequence
  Synthetic
uggucuuauuuauuauugu

SEQ ID NO: 713 - RNA, 19 nt, Artificial Sequence
  Synthetic
uguguuauuuaaaugagug

SEQ ID NO: 714 - RNA, 19 nt, Artificial Sequence
  Synthetic
guguuugucaccguugggg

SEQ ID NO: 715 - RNA, 19 nt, Artificial Sequence
  Synthetic
gauuggggaagacuguggc

SEQ ID NO: 716 - RNA, 19 nt, Artificial Sequence
  Synthetic
cugcuagcacuuggagcca

SEQ ID NO: 717 - RNA, 19 nt, Artificial Sequence
  Synthetic
aaggguucagagacucagg

SEQ ID NO: 718 - RNA, 19 nt, Artificial Sequence
  Synthetic
ggccccagcacuaaagcag

SEQ ID NO: 719 - RNA, 19 nt, Artificial Sequence
  Synthetic
guggacaccaggagucccu

SEQ ID NO: 720 - RNA, 19 nt, Artificial Sequence
  Synthetic
ugguaauaaguacugugua

SEQ ID NO: 721 - RNA, 19 nt, Artificial Sequence
  Synthetic
acagaauucugcuaccuca

SEQ ID NO: 722 - RNA, 19 nt, Artificial Sequence
  Synthetic
acugggguccuggggccuc

SEQ ID NO: 723 - RNA, 19 nt, Artificial Sequence
  Synthetic
cggagccucauccgaggca

SEQ ID NO: 724 - RNA, 19 nt, Artificial Sequence
  Synthetic
agggucaggagaggggcag

SEQ ID NO: 725 - RNA, 19 nt, Artificial Sequence
  Synthetic
gaacagccgcuccugucug

SEQ ID NO: 726 - RNA, 19 nt, Artificial Sequence
  Synthetic
gccagccagcagccagcuc

SEQ ID NO: 727 - RNA, 19 nt, Artificial Sequence
  Synthetic
cucagccaacgaguaauuu

SEQ ID NO: 728 - RNA, 19 nt, Artificial Sequence
  Synthetic
uauuguuuuuccuuguauu

SEQ ID NO: 729 - RNA, 19 nt, Artificial Sequence
  Synthetic
uuaaauauuaaauauguua

SEQ ID NO: 730 - RNA, 19 nt, Artificial Sequence
  Synthetic
agcaaagaguuaauauaua

SEQ ID NO: 731 - RNA, 19 nt, Artificial Sequence
  Synthetic
agaaggguaccuugaacac

SEQ ID NO: 732 - RNA, 19 nt, Artificial Sequence
  Synthetic
cugggggaggggacauuga

SEQ ID NO: 733 - RNA, 19 nt, Artificial Sequence
  Synthetic
aacaaguuguuucauugac

SEQ ID NO: 734 - RNA, 19 nt, Artificial Sequence
  Synthetic
cuaucaaacugaagccaga

SEQ ID NO: 735 - RNA, 19 nt, Artificial Sequence
  Synthetic
gaaauaaaguuggugacag

SEQ ID NO: 736 - RNA, 19 nt, Artificial Sequence
  Synthetic
gaugcauaggcuggguggc

SEQ ID NO: 737 - RNA, 19 nt, Artificial Sequence
  Synthetic
ggagaggauugaggagcgg

SEQ ID NO: 738 - RNA, 19 nt, Artificial Sequence
  Synthetic
ugaggcccagugccaacag

SEQ ID NO: 739 - RNA, 19 nt, Artificial Sequence
  Synthetic
uggucaacaaaagcgccau

SEQ ID NO: 740 - RNA, 19 nt, Artificial Sequence
  Synthetic
aagugagagcaaugaccgu

SEQ ID NO: 741 - RNA, 19 nt, Artificial Sequence
  Synthetic
aggcaaagccgccaaggca

SEQ ID NO: 742 - RNA, 19 nt, Artificial Sequence
  Synthetic
gaggcacagggccugggga

SEQ ID NO: 743 - RNA, 19 nt, Artificial Sequence
  Synthetic
cccugagggcuguagaggg

SEQ ID NO: 744 - RNA, 19 nt, Artificial Sequence
  Synthetic
ccagcuccucaaugagcuc

SEQ ID NO: 745 - RNA, 19 nt, Artificial Sequence
  Synthetic
gguucugggugauguugac

SEQ ID NO: 746 - RNA, 19 nt, Artificial Sequence
  Synthetic
ugcagagcggagccuucug

SEQ ID NO: 747 - RNA, 19 nt, Artificial Sequence
  Synthetic
uccauaccaugcugccauu

SEQ ID NO: 748 - RNA, 19 nt, Artificial Sequence
  Synthetic
cagcugucagguugaugcu

SEQ ID NO: 749 - RNA, 19 nt, Artificial Sequence
  Synthetic
gggcugcacaguacaugcc

SEQ ID NO: 750 - RNA, 19 nt, Artificial Sequence
  Synthetic
cguugaucagggauuccag

SEQ ID NO: 751 - RNA, 19 nt, Artificial Sequence
  Synthetic
uggcacugcagccugacac

SEQ ID NO: 752 - RNA, 19 nt, Artificial Sequence
  Synthetic
uccucugggucuucucgau

SEQ ID NO: 753 - RNA, 19 nt, Artificial Sequence
  Synthetic
ggcagaauccgcucagcau

SEQ ID NO: 754 - RNA, 19 nt, Artificial Sequence
  Synthetic
cagcugagaccuugugcgg

SEQ ID NO: 755 - RNA, 19 nt, Artificial Sequence
  Synthetic
gcaagcuggaaaacugccc

SEQ ID NO: 756 - RNA, 19 nt, Artificial Sequence
  Synthetic
uuuuggugucucggacaug

SEQ ID NO: 757 - RNA, 19 nt, Artificial Sequence
  Synthetic
caaacugggccaccucgau

SEQ ID NO: 758 - RNA, 19 nt, Artificial Sequence
  Synthetic
guaagagcagguccuuuac

SEQ ID NO: 759 - RNA, 19 nt, Artificial Sequence
  Synthetic
gaaaaaguuucuuuaaaug

SEQ ID NO: 760 - RNA, 19 nt, Artificial Sequence
  Synthetic
aguugaacugucccucgcg

SEQ ID NO: 761 - RNA, 19 nt, Artificial Sequence
  Synthetic
ugaugcuuucgaaguuuca

SEQ ID NO: 762 - RNA, 19 nt, Artificial Sequence
  Synthetic
uccugucucugcaaauaau

SEQ ID NO: 763 - RNA, 19 nt, Artificial Sequence
  Synthetic
gcaacuucaauagucaggu

SEQ ID NO: 764 - RNA, 19 nt, Artificial Sequence
  Synthetic
agaaagaaaaaugaaucug

SEQ ID NO: 765 - RNA, 19 nt, Artificial Sequence
  Synthetic
caagacauuuuugacauca

SEQ ID NO: 766 - RNA, 19 nt, Artificial Sequence
  Synthetic
cccuccuucccgccuaccc

SEQ ID NO: 767 - RNA, 19 nt, Artificial Sequence
  Synthetic
aauuuuaccccucccuaac

SEQ ID NO: 768 - RNA, 19 nt, Artificial Sequence
  Synthetic
cugaggucuaagcuaagga

SEQ ID NO: 769 - RNA, 19 nt, Artificial Sequence
  Synthetic
gaagacgggcagcacaggc

SEQ ID NO: 770 - RNA, 19 nt, Artificial Sequence
  Synthetic
gcugaggucggcuaggcug

SEQ ID NO: 771 - RNA, 19 nt, Artificial Sequence
  Synthetic
gcccugggcaaggggaagg

SEQ ID NO: 772 - RNA, 19 nt, Artificial Sequence
  Synthetic
ggaggcccaccaggcugag

SEQ ID NO: 773 - RNA, 19 nt, Artificial Sequence
  Synthetic
cucagggcccuggacagag

SEQ ID NO: 774 - RNA, 19 nt, Artificial Sequence
  Synthetic
aucccuggguccaccgagc

SEQ ID NO: 775 - RNA, 19 nt, Artificial Sequence
  Synthetic
gggguguagggacauguca

SEQ ID NO: 776 - RNA, 19 nt, Artificial Sequence
  Synthetic
gugcucuagggcaggggag

SEQ ID NO: 777 - RNA, 19 nt, Artificial Sequence
  Synthetic
ccacuguaaugcuacagug

SEQ ID NO: 778 - RNA, 19 nt, Artificial Sequence
  Synthetic
gucuggcaaggggggcacc

SEQ ID NO: 779 - RNA, 19 nt, Artificial Sequence
  Synthetic
gucccugucccaccacaug

SEQ ID NO: 780 - RNA, 19 nt, Artificial Sequence
  Synthetic
ugccugugugugaaguggg

SEQ ID NO: 781 - RNA, 19 nt, Artificial Sequence
  Synthetic
gcugcugucugccucaguu

SEQ ID NO: 782 - RNA, 19 nt, Artificial Sequence
  Synthetic
aagaagaagugugccugag

SEQ ID NO: 783 - RNA, 19 nt, Artificial Sequence
  Synthetic
acaauaauaaauaagacca

SEQ ID NO: 784 - RNA, 19 nt, Artificial Sequence
  Synthetic
cacucauuuaaauaacaca

SEQ ID NO: 785 - RNA, 19 nt, Artificial Sequence
  Synthetic
ccccaacggugacaaacac

SEQ ID NO: 786 - RNA, 19 nt, Artificial Sequence
  Synthetic
gccacagucuuccccaauc

SEQ ID NO: 787 - RNA, 19 nt, Artificial Sequence
  Synthetic
uggcuccaagugcuagcag

SEQ ID NO: 788 - RNA, 19 nt, Artificial Sequence
  Synthetic
ccugagucucugaacccuu

SEQ ID NO: 789 - RNA, 19 nt, Artificial Sequence
  Synthetic
cugcuuuagugcuggggcc

SEQ ID NO: 790 - RNA, 19 nt, Artificial Sequence
  Synthetic
agggacuccugguguccac

SEQ ID NO: 791 - RNA, 19 nt, Artificial Sequence
  Synthetic
uacacaguacuuauuacca

SEQ ID NO: 792 - RNA, 19 nt, Artificial Sequence
  Synthetic
ugagguagcagaauucugu

SEQ ID NO: 793 - RNA, 19 nt, Artificial Sequence
  Synthetic
gaggccccaggaccccagu

SEQ ID NO: 794 - RNA, 19 nt, Artificial Sequence
  Synthetic
ugccucggaugaggcuccg

SEQ ID NO: 795 - RNA, 19 nt, Artificial Sequence
  Synthetic
cugccccucuccugacccu

SEQ ID NO: 796 - RNA, 19 nt, Artificial Sequence
  Synthetic
cagacaggagcggcuguuc

SEQ ID NO: 797 - RNA, 19 nt, Artificial Sequence
  Synthetic
gagcuggcugcuggcuggc

SEQ ID NO: 798 - RNA, 19 nt, Artificial Sequence
  Synthetic
aaauuacucguuggcugag

SEQ ID NO: 799 - RNA, 19 nt, Artificial Sequence
  Synthetic
aauacaaggaaaaacaaua

SEQ ID NO: 800 - RNA, 19 nt, Artificial Sequence
  Synthetic
uaacauauuuaauauuuaa

SEQ ID NO: 801 - RNA, 19 nt, Artificial Sequence
  Synthetic
uauauauuaacucuuugcu

SEQ ID NO: 802 - RNA, 19 nt, Artificial Sequence
  Synthetic
guguucaagguacccuucu

SEQ ID NO: 803 - RNA, 19 nt, Artificial Sequence
  Synthetic
ucaauguccccucccccag

SEQ ID NO: 804 - RNA, 19 nt, Artificial Sequence
  Synthetic
gucaaugaaacaacuuguu

SEQ ID NO: 805 - RNA, 19 nt, Artificial Sequence
  Synthetic
ucuggcuucaguuugauag

SEQ ID NO: 806 - RNA, 19 nt, Artificial Sequence
  Synthetic
cugucaccaacuuuauuuc

SEQ ID NO: 807 - RNA, 19 nt, Artificial Sequence
  Synthetic
ccaaggcuccagcccggcc

SEQ ID NO: 808 - RNA, 19 nt, Artificial Sequence
  Synthetic
cgggcuccgaggcgagagg

SEQ ID NO: 809 - RNA, 19 nt, Artificial Sequence
  Synthetic
gcugcauggaguggccggc

SEQ ID NO: 810 - RNA, 19 nt, Artificial Sequence
  Synthetic
cgcggcucugcgggcugug

SEQ ID NO: 811 - RNA, 19 nt, Artificial Sequence
  Synthetic
gggcgcugcugcucugcgc

SEQ ID NO: 812 - RNA, 19 nt, Artificial Sequence
  Synthetic
ccggcggcgggggcggggg

SEQ ID NO: 813 - RNA, 19 nt, Artificial Sequence
  Synthetic
gcgggggcgccgcgccuac

SEQ ID NO: 814 - RNA, 19 nt, Artificial Sequence
  Synthetic
cggaaacucagccaccugu

SEQ ID NO: 815 - RNA, 19 nt, Artificial Sequence
  Synthetic
ugacaaauuugagugucuc

SEQ ID NO: 816 - RNA, 19 nt, Artificial Sequence
  Synthetic
cuguugaaaaccucugcac

SEQ ID NO: 817 - RNA, 19 nt, Artificial Sequence
  Synthetic
caguaauauggacauggaa

SEQ ID NO: 818 - RNA, 19 nt, Artificial Sequence
  Synthetic
auccacccgagggagccag

SEQ ID NO: 819 - RNA, 19 nt, Artificial Sequence
  Synthetic
gcucaaauuguagucuaug

SEQ ID NO: 820 - RNA, 19 nt, Artificial Sequence
  Synthetic
gguauuuuagucauuuugg

SEQ ID NO: 821 - RNA, 19 nt, Artificial Sequence
  Synthetic
gcgacaaacaagauaagaa

SEQ ID NO: 822 - RNA, 19 nt, Artificial Sequence
  Synthetic
aaauagcuccggaaacucg

SEQ ID NO: 823 - RNA, 19 nt, Artificial Sequence
  Synthetic
gucguucaauagaaguacc

SEQ ID NO: 824 - RNA, 19 nt, Artificial Sequence
  Synthetic
cccugaaugagaggauuug

SEQ ID NO: 825 - RNA, 19 nt, Artificial Sequence
  Synthetic
gucugcaagugggguccca

SEQ ID NO: 826 - RNA, 19 nt, Artificial Sequence
  Synthetic
aguguagcaccaaugagag

SEQ ID NO: 827 - RNA, 19 nt, Artificial Sequence
  Synthetic
gugagaagccuagcauuuu

SEQ ID NO: 828 - RNA, 19 nt, Artificial Sequence
  Synthetic
ugguugaaaaaugcaucuc

SEQ ID NO: 829 - RNA, 19 nt, Artificial Sequence
  Synthetic
cacccccagaaggugaucc

SEQ ID NO: 830 - RNA, 19 nt, Artificial Sequence
  Synthetic
cugagucugcugugacuga

SEQ ID NO: 831 - RNA, 19 nt, Artificial Sequence
  Synthetic
agcuucaaugcauuuggca

SEQ ID NO: 832 - RNA, 19 nt, Artificial Sequence
  Synthetic
acaaccugagcuacaugaa

SEQ ID NO: 833 - RNA, 19 nt, Artificial Sequence
  Synthetic
aguguucuuggcucccugg

SEQ ID NO: 834 - RNA, 19 nt, Artificial Sequence
  Synthetic
gaaggaauaccagucccga

SEQ ID NO: 835 - RNA, 19 nt, Artificial Sequence
  Synthetic
acacuaacuauacucucua

SEQ ID NO: 836 - RNA, 19 nt, Artificial Sequence
  Synthetic
acuauuggcacagaagccu

SEQ ID NO: 837 - RNA, 19 nt, Artificial Sequence
  Synthetic
uggaaaaaauucaucaaug

SEQ ID NO: 838 - RNA, 19 nt, Artificial Sequence
  Synthetic
gugaaaacaucuuuagaga

SEQ ID NO: 839 - RNA, 19 nt, Artificial Sequence
  Synthetic
aaggccaauacuuugguug

SEQ ID NO: 840 - RNA, 19 nt, Artificial Sequence
  Synthetic
guuccuuugaucugaccaa

SEQ ID NO: 841 - RNA, 19 nt, Artificial Sequence
  Synthetic
aagugaaggauuccaguuu

SEQ ID NO: 842 - RNA, 19 nt, Artificial Sequence
  Synthetic
uugaacaacacagugucca

SEQ ID NO: 843 - RNA, 19 nt, Artificial Sequence
  Synthetic
aaauaauggucaaggauaa

SEQ ID NO: 844 - RNA, 19 nt, Artificial Sequence
  Synthetic
augcaggaaaaauuaaacc

SEQ ID NO: 845 - RNA, 19 nt, Artificial Sequence
  Synthetic
cauccuucaauauagugcc

SEQ ID NO: 846 - RNA, 19 nt, Artificial Sequence
  Synthetic
cuuuaacuucccgugugaa

SEQ ID NO: 847 - RNA, 19 nt, Artificial Sequence
  Synthetic
aaccugauccuccacauau

SEQ ID NO: 848 - RNA, 19 nt, Artificial Sequence
  Synthetic
uuaaaaaccucuccuucca

SEQ ID NO: 849 - RNA, 19 nt, Artificial Sequence
  Synthetic
acaaugaugaccuauaugu

SEQ ID NO: 850 - RNA, 19 nt, Artificial Sequence
  Synthetic
ugcaaugggagaauccaca

SEQ ID NO: 851 - RNA, 19 nt, Artificial Sequence
  Synthetic
agaauuuuauuagcagaug

SEQ ID NO: 852 - RNA, 19 nt, Artificial Sequence
  Synthetic
gccuauuuuaugaaguaga

SEQ ID NO: 853 - RNA, 19 nt, Artificial Sequence
  Synthetic
aagucaauaacagccaaac

SEQ ID NO: 854 - RNA, 19 nt, Artificial Sequence
  Synthetic
cugagacacauaauguuuu

SEQ ID NO: 855 - RNA, 19 nt, Artificial Sequence
  Synthetic
ucuacguccaagaggcuaa

SEQ ID NO: 856 - RNA, 19 nt, Artificial Sequence
  Synthetic
aaugugagaauccagaauu

SEQ ID NO: 857 - RNA, 19 nt, Artificial Sequence
  Synthetic
uugagagaaauguggagaa

SEQ ID NO: 858 - RNA, 19 nt, Artificial Sequence
  Synthetic
auacaucuuguuucauggu

SEQ ID NO: 859 - RNA, 19 nt, Artificial Sequence
  Synthetic
ucccugguguucuuccuga

SEQ ID NO: 860 - RNA, 19 nt, Artificial Sequence
  Synthetic
auacuuugaacacagucag

SEQ ID NO: 861 - RNA, 19 nt, Artificial Sequence
  Synthetic
gaauaagagucaaaacaaa

SEQ ID NO: 862 - RNA, 19 nt, Artificial Sequence
  Synthetic
auaaguuaugcuaugagga

SEQ ID NO: 863 - RNA, 19 nt, Artificial Sequence
  Synthetic
augacaaacucuggaguaa

SEQ ID NO: 864 - RNA, 19 nt, Artificial Sequence
  Synthetic
auuggagccaagaaaugag

SEQ ID NO: 865 - RNA, 19 nt, Artificial Sequence
  Synthetic
guauagguaagaagcgcaa

SEQ ID NO: 866 - RNA, 19 nt, Artificial Sequence
  Synthetic
auuccacacucuacauaac

SEQ ID NO: 867 - RNA, 19 nt, Artificial Sequence
  Synthetic
ccauguuacucauuguucc

SEQ ID NO: 868 - RNA, 19 nt, Artificial Sequence
  Synthetic
cagucaucgucgcaggugc

SEQ ID NO: 869 - RNA, 19 nt, Artificial Sequence
  Synthetic
caaucauaguacuccugcu

SEQ ID NO: 870 - RNA, 19 nt, Artificial Sequence
  Synthetic
uuuaccuaaaaaggcucaa

SEQ ID NO: 871 - RNA, 19 nt, Artificial Sequence
  Synthetic
agauuauuauauucccucc

SEQ ID NO: 872 - RNA, 19 nt, Artificial Sequence
  Synthetic
caauuccugauccuggcaa

SEQ ID NO: 873 - RNA, 19 nt, Artificial Sequence
  Synthetic
agauuuuuaaagaaauguu

SEQ ID NO: 874 - RNA, 19 nt, Artificial Sequence
  Synthetic
uuggagaccagaaugauga

SEQ ID NO: 875 - RNA, 19 nt, Artificial Sequence
  Synthetic
auacucugcacuggaagaa

SEQ ID NO: 876 - RNA, 19 nt, Artificial Sequence
  Synthetic
aguacgacaucuaugagaa

SEQ ID NO: 877 - RNA, 19 nt, Artificial Sequence
  Synthetic
agcaaaccaaggaggaaac

SEQ ID NO: 878 - RNA, 19 nt, Artificial Sequence
  Synthetic
ccgacucuguagugcugau

SEQ ID NO: 879 - RNA, 19 nt, Artificial Sequence
  Synthetic
uagaaaaccugaagaaagc

SEQ ID NO: 880 - RNA, 19 nt, Artificial Sequence
  Synthetic
ccucucagugauggagaua

SEQ ID NO: 881 - RNA, 19 nt, Artificial Sequence
  Synthetic
aauuuauuuuuaccuucac

SEQ ID NO: 882 - RNA, 19 nt, Artificial Sequence
  Synthetic
cugugaccuugagaagauu

SEQ ID NO: 883 - RNA, 19 nt, Artificial Sequence
  Synthetic
ucuucccauucuccauuug

SEQ ID NO: 884 - RNA, 19 nt, Artificial Sequence
  Synthetic
guuaucugggaacuuauua

SEQ ID NO: 885 - RNA, 19 nt, Artificial Sequence
  Synthetic
aaauggaaacugaaacuac

SEQ ID NO: 886 - RNA, 19 nt, Artificial Sequence
  Synthetic
cugcaccauuuaaaaacag

SEQ ID NO: 887 - RNA, 19 nt, Artificial Sequence
  Synthetic
ggcagcucauaagagccac

SEQ ID NO: 888 - RNA, 19 nt, Artificial Sequence
  Synthetic
caggucuuuauguugaguc

SEQ ID NO: 889 - RNA, 19 nt, Artificial Sequence
  Synthetic
cgcgcaccgaaaaacuaaa

SEQ ID NO: 890 - RNA, 19 nt, Artificial Sequence
  Synthetic
aaauaaugggcgcuuugga

SEQ ID NO: 891 - RNA, 19 nt, Artificial Sequence
  Synthetic
agaagaguguggagucauu

SEQ ID NO: 892 - RNA, 19 nt, Artificial Sequence
  Synthetic
ucucauugaauuauaaaag

SEQ ID NO: 893 - RNA, 19 nt, Artificial Sequence
  Synthetic
gccagcaggcuucaaacua

SEQ ID NO: 894 - RNA, 19 nt, Artificial Sequence
  Synthetic
aggggacaaagcaaaaagu

SEQ ID NO: 895 - RNA, 19 nt, Artificial Sequence
  Synthetic
ugaugauagugguggaguu

SEQ ID NO: 896 - RNA, 19 nt, Artificial Sequence
  Synthetic
uaaucuuaucaagaguugu

SEQ ID NO: 897 - RNA, 19 nt, Artificial Sequence
  Synthetic
ugacaacuuccugagggau

SEQ ID NO: 898 - RNA, 19 nt, Artificial Sequence
  Synthetic
ucuauacuugcuuuguguu

SEQ ID NO: 899 - RNA, 19 nt, Artificial Sequence
  Synthetic
ucuuugugucaacaugaac

SEQ ID NO: 900 - RNA, 19 nt, Artificial Sequence
  Synthetic
caaauuuuauuuguagggg

SEQ ID NO: 901 - RNA, 19 nt, Artificial Sequence
  Synthetic
gaacucauuuggggugcaa

SEQ ID NO: 902 - RNA, 19 nt, Artificial Sequence
  Synthetic
aaugcuaaugucaaacuug

SEQ ID NO: 903 - RNA, 19 nt, Artificial Sequence
  Synthetic
gagucacaaagaacaugua

SEQ ID NO: 904 - RNA, 19 nt, Artificial Sequence
  Synthetic
agaaaacaaaauggauaaa

SEQ ID NO: 905 - RNA, 19 nt, Artificial Sequence
  Synthetic
aaucugauauguauuguuu

SEQ ID NO: 906 - RNA, 19 nt, Artificial Sequence
  Synthetic
ugggauccuauugaaccau

SEQ ID NO: 907 - RNA, 19 nt, Artificial Sequence
  Synthetic
uguuuguggcuauuaaaac

SEQ ID NO: 908 - RNA, 19 nt, Artificial Sequence
  Synthetic
cucuuuuaacagucugggc

SEQ ID NO: 909 - RNA, 19 nt, Artificial Sequence
  Synthetic
cuggguccgguggcucacg

SEQ ID NO: 910 - RNA, 19 nt, Artificial Sequence
  Synthetic
gccuguaaucccagcaauu

SEQ ID NO: 911 - RNA, 19 nt, Artificial Sequence
  Synthetic
uugggaguccgaggcgggc

SEQ ID NO: 912 - RNA, 19 nt, Artificial Sequence
  Synthetic
cggaucacucgaggucagg

SEQ ID NO: 913 - RNA, 19 nt, Artificial Sequence
  Synthetic
gaguuccagaccagccuga

SEQ ID NO: 914 - RNA, 19 nt, Artificial Sequence
  Synthetic
accaaaauggugaaaccuc

SEQ ID NO: 915 - RNA, 19 nt, Artificial Sequence
  Synthetic
ccucucuacuaaaacuaca

SEQ ID NO: 916 - RNA, 19 nt, Artificial Sequence
  Synthetic
aaaaauuaacugggugugg

SEQ ID NO: 917 - RNA, 19 nt, Artificial Sequence
  Synthetic
guggcgcgugccuguaauc

SEQ ID NO: 918 - RNA, 19 nt, Artificial Sequence
  Synthetic
cccagcuacucgggaagcu

SEQ ID NO: 919 - RNA, 19 nt, Artificial Sequence
  Synthetic
ugaggcaggugaauuguuu

SEQ ID NO: 920 - RNA, 19 nt, Artificial Sequence
  Synthetic
ugaaccugggagguggagg

SEQ ID NO: 921 - RNA, 19 nt, Artificial Sequence
  Synthetic
guugcagugagcagagauc

SEQ ID NO: 922 - RNA, 19 nt, Artificial Sequence
  Synthetic
cacaccacugcacucuagc

SEQ ID NO: 923 - RNA, 19 nt, Artificial Sequence
  Synthetic
ccugggugacagagcaaga

SEQ ID NO: 924 - RNA, 19 nt, Artificial Sequence
  Synthetic
acucugucuaaaaaacaaa

SEQ ID NO: 925 - RNA, 19 nt, Artificial Sequence
  Synthetic
aacaaaacaaaacaaaaca

SEQ ID NO: 926 - RNA, 19 nt, Artificial Sequence
  Synthetic
aaaaaaaccucuuaauauu

SEQ ID NO: 927 - RNA, 19 nt, Artificial Sequence
  Synthetic
ucuggagucaucauucccu

SEQ ID NO: 928 - RNA, 19 nt, Artificial Sequence
  Synthetic
uucgacagcauuuuccucu

SEQ ID NO: 929 - RNA, 19 nt, Artificial Sequence
  Synthetic
ugcuuugaaagccccagaa

SEQ ID NO: 930 - RNA, 19 nt, Artificial Sequence
  Synthetic
aaucaguguuggccaugau

SEQ ID NO: 931 - RNA, 19 nt, Artificial Sequence
  Synthetic
ugacaacuacagaaaaacc

SEQ ID NO: 932 - RNA, 19 nt, Artificial Sequence
  Synthetic
cagaggcagcuucuuugcc

SEQ ID NO: 933 - RNA, 19 nt, Artificial Sequence
  Synthetic
caagaccuuucaaagccau

SEQ ID NO: 934 - RNA, 19 nt, Artificial Sequence
  Synthetic
uuuuaggcuguuaggggca

SEQ ID NO: 935 - RNA, 19 nt, Artificial Sequence
  Synthetic
aguggagguagaaugacuc

SEQ ID NO: 936 - RNA, 19 nt, Artificial Sequence
  Synthetic
ccuuggguauuagaguuuc

SEQ ID NO: 937 - RNA, 19 nt, Artificial Sequence
  Synthetic
caaccaugaagucucuaac

SEQ ID NO: 938 - RNA, 19 nt, Artificial Sequence
  Synthetic
caauguauuuucuucaccu

SEQ ID NO: 939 - RNA, 19 nt, Artificial Sequence
  Synthetic
ucugcuacucaaguagcau

SEQ ID NO: 940 - RNA, 19 nt, Artificial Sequence
  Synthetic
uuuacugugucuuugguuu

SEQ ID NO: 941 - RNA, 19 nt, Artificial Sequence
  Synthetic
ugugcuaggcccccgggug

SEQ ID NO: 942 - RNA, 19 nt, Artificial Sequence
  Synthetic
gugaagcacagaccccuuc

SEQ ID NO: 943 - RNA, 19 nt, Artificial Sequence
  Synthetic
ccagggguuuacagucuau

SEQ ID NO: 944 - RNA, 19 nt, Artificial Sequence
  Synthetic
uuugagacuccucaguucu

SEQ ID NO: 945 - RNA, 19 nt, Artificial Sequence
  Synthetic
uugccacuuuuuuuuuuaa

SEQ ID NO: 946 - RNA, 19 nt, Artificial Sequence
  Synthetic
aucuccaccagucauuuuu

SEQ ID NO: 947 - RNA, 19 nt, Artificial Sequence
  Synthetic
ucagaccuuuuaacuccuc

SEQ ID NO: 948 - RNA, 19 nt, Artificial Sequence
  Synthetic
caauuccaacacugauuuc

SEQ ID NO: 949 - RNA, 19 nt, Artificial Sequence
  Synthetic
ccccuuuugcauucucccu

SEQ ID NO: 950 - RNA, 19 nt, Artificial Sequence
  Synthetic
uccuucccuuccuuguagc

SEQ ID NO: 951 - RNA, 19 nt, Artificial Sequence
  Synthetic
ccuuuugacuuucauugga

SEQ ID NO: 952 - RNA, 19 nt, Artificial Sequence
  Synthetic
aaauuaggauguaaaucug

SEQ ID NO: 953 - RNA, 19 nt, Artificial Sequence
  Synthetic
gcucaggagaccuggagga

SEQ ID NO: 954 - RNA, 19 nt, Artificial Sequence
  Synthetic
agcagaggauaauuagcau

SEQ ID NO: 955 - RNA, 19 nt, Artificial Sequence
  Synthetic
ucucagguuaagugugagu

SEQ ID NO: 956 - RNA, 19 nt, Artificial Sequence
  Synthetic
uaaucugagaaacaaugac

SEQ ID NO: 957 - RNA, 19 nt, Artificial Sequence
  Synthetic
cuaauucuugcauauuuug

SEQ ID NO: 958 - RNA, 19 nt, Artificial Sequence
  Synthetic
guaacuuccaugugagggu

SEQ ID NO: 959 - RNA, 19 nt, Artificial Sequence
  Synthetic
uuuucagcauugauauuug

SEQ ID NO: 960 - RNA, 19 nt, Artificial Sequence
  Synthetic
gugcauuuucuaaacagag

SEQ ID NO: 961 - RNA, 19 nt, Artificial Sequence
  Synthetic
gaugaggugguaucuucac

SEQ ID NO: 962 - RNA, 19 nt, Artificial Sequence
  Synthetic
cguagaacauugguauucg

SEQ ID NO: 963 - RNA, 19 nt, Artificial Sequence
  Synthetic
gcuugagaaaaaaagaaua

SEQ ID NO: 964 - RNA, 19 nt, Artificial Sequence
  Synthetic
aguugaaccuauuucucuu

SEQ ID NO: 965 - RNA, 19 nt, Artificial Sequence
  Synthetic
uucuuuacaagaugggucc

SEQ ID NO: 966 - RNA, 19 nt, Artificial Sequence
  Synthetic
caggauuccucuuuucucu

SEQ ID NO: 967 - RNA, 19 nt, Artificial Sequence
  Synthetic
ugccauaaaugauuaauua

SEQ ID NO: 968 - RNA, 19 nt, Artificial Sequence
  Synthetic
aaauagcuuuugugucuua

SEQ ID NO: 969 - RNA, 19 nt, Artificial Sequence
  Synthetic
acauugguagccagccagc

SEQ ID NO: 970 - RNA, 19 nt, Artificial Sequence
  Synthetic
ccaaggcucuguuuaugcu

SEQ ID NO: 971 - RNA, 19 nt, Artificial Sequence
  Synthetic
uuuuggggggcauauauug

SEQ ID NO: 972 - RNA, 19 nt, Artificial Sequence
  Synthetic
ggguuccauucucaccuau

SEQ ID NO: 973 - RNA, 19 nt, Artificial Sequence
  Synthetic
uccacacaacauauccgua

SEQ ID NO: 974 - RNA, 19 nt, Artificial Sequence
  Synthetic
auauauccccucuacucuu

SEQ ID NO: 975 - RNA, 19 nt, Artificial Sequence
  Synthetic
uacuucccccaaauuuaaa

SEQ ID NO: 976 - RNA, 19 nt, Artificial Sequence
  Synthetic
agaaguaugggaaaugaga

SEQ ID NO: 977 - RNA, 19 nt, Artificial Sequence
  Synthetic
aggcauuucccccacccca

SEQ ID NO: 978 - RNA, 19 nt, Artificial Sequence
  Synthetic
auuucucuccucacacaca

SEQ ID NO: 979 - RNA, 19 nt, Artificial Sequence
  Synthetic
agacucauauuacugguag

SEQ ID NO: 980 - RNA, 19 nt, Artificial Sequence
  Synthetic
ggaacuugagaacuuuauu

SEQ ID NO: 981 - RNA, 19 nt, Artificial Sequence
  Synthetic
uuccaaguuguucaaacau

SEQ ID NO: 982 - RNA, 19 nt, Artificial Sequence
  Synthetic
uuuaccaaucauauuaaua

SEQ ID NO: 983 - RNA, 19 nt, Artificial Sequence
  Synthetic
acaaugaugcuauuugcaa

SEQ ID NO: 984 - RNA, 19 nt, Artificial Sequence
  Synthetic
auuccugcuccuaggggag

SEQ ID NO: 985 - RNA, 19 nt, Artificial Sequence
  Synthetic
ggggagauaagaaacccuc

SEQ ID NO: 986 - RNA, 19 nt, Artificial Sequence
  Synthetic
cacucucuacagguuuggg

SEQ ID NO: 987 - RNA, 19 nt, Artificial Sequence
  Synthetic
guacaaguggcaaccugcu

SEQ ID NO: 988 - RNA, 19 nt, Artificial Sequence
  Synthetic
uuccauggccguguagaag

SEQ ID NO: 989 - RNA, 19 nt, Artificial Sequence
  Synthetic
gcauggugcccuggcuucu

SEQ ID NO: 990 - RNA, 19 nt, Artificial Sequence
  Synthetic
ucugaggaagcugggguuc

SEQ ID NO: 991 - RNA, 19 nt, Artificial Sequence
  Synthetic
caugacaauggcagaugua

SEQ ID NO: 992 - RNA, 19 nt, Artificial Sequence
  Synthetic
aaaguuauucuugaaguca

SEQ ID NO: 993 - RNA, 19 nt, Artificial Sequence
  Synthetic
agauugaggcugggagaca

SEQ ID NO: 994 - RNA, 19 nt, Artificial Sequence
  Synthetic
agccguaguagauguucua

SEQ ID NO: 995 - RNA, 19 nt, Artificial Sequence
  Synthetic
acuuuguucugcuguucuc

SEQ ID NO: 996 - RNA, 19 nt, Artificial Sequence
  Synthetic
cuagaaagaauauuugguu

SEQ ID NO: 997 - RNA, 19 nt, Artificial Sequence
  Synthetic
uuuccuguauaggaaugag

SEQ ID NO: 998 - RNA, 19 nt, Artificial Sequence
  Synthetic
gauuaauuccuuuccaggu

SEQ ID NO: 999 - RNA, 19 nt, Artificial Sequence
  Synthetic
uauuuuauaauucugggaa

SEQ ID NO: 1000 - RNA, 19 nt, Artificial Sequence
  Synthetic
agcaaaacccaugccuccc

SEQ ID NO: 1001 - RNA, 19 nt, Artificial Sequence
  Synthetic
cccuagccauuuuuacugu

SEQ ID NO: 1002 - RNA, 19 nt, Artificial Sequence
  Synthetic
uuauccuauuuagauggcc

SEQ ID NO: 1003 - RNA, 19 nt, Artificial Sequence
  Synthetic
caugaagaggaugcuguga

SEQ ID NO: 1004 - RNA, 19 nt, Artificial Sequence
  Synthetic
aaauucccaacaaacauug

SEQ ID NO: 1005 - RNA, 19 nt, Artificial Sequence
  Synthetic
gaugcugacagucaugcag

SEQ ID NO: 1006 - RNA, 19 nt, Artificial Sequence
  Synthetic
gucugggaguggggaagug

SEQ ID NO: 1007 - RNA, 19 nt, Artificial Sequence
  Synthetic
gaucuuuuguucccauccu

SEQ ID NO: 1008 - RNA, 19 nt, Artificial Sequence
  Synthetic
ucuucuuuuagcaguaaaa

SEQ ID NO: 1009 - RNA, 19 nt, Artificial Sequence
  Synthetic
auagcugagggaaaaggga

SEQ ID NO: 1010 - RNA, 19 nt, Artificial Sequence
  Synthetic
agggaaaaggaaguuaugg

SEQ ID NO: 1011 - RNA, 19 nt, Artificial Sequence
  Synthetic
ggaauaccuguggugguug

SEQ ID NO: 1012 - RNA, 19 nt, Artificial Sequence
  Synthetic
gugaucccuaggucuuggg

SEQ ID NO: 1013 - RNA, 19 nt, Artificial Sequence
  Synthetic
gagcucuuggaggugucug

SEQ ID NO: 1014 - RNA, 19 nt, Artificial Sequence
  Synthetic
guaucaguggauuucccau

SEQ ID NO: 1015 - RNA, 19 nt, Artificial Sequence
  Synthetic
uccccugugggaaauuagu

SEQ ID NO: 1016 - RNA, 19 nt, Artificial Sequence
  Synthetic
uaggcucauuuacuguuuu

SEQ ID NO: 1017 - RNA, 19 nt, Artificial Sequence
  Synthetic
uaggucuagccuaugugga

SEQ ID NO: 1018 - RNA, 19 nt, Artificial Sequence
  Synthetic
auuuuuuccuaacauaccu

SEQ ID NO: 1019 - RNA, 19 nt, Artificial Sequence
  Synthetic
uaagcaaacccagugucag

SEQ ID NO: 1020 - RNA, 19 nt, Artificial Sequence
  Synthetic
ggaugguaauucuuauucu

SEQ ID NO: 1021 - RNA, 19 nt, Artificial Sequence
  Synthetic
uuucguucaguuaaguuuu

SEQ ID NO: 1022 - RNA, 19 nt, Artificial Sequence
  Synthetic
uucccuucaucugggcacu

SEQ ID NO: 1023 - RNA, 19 nt, Artificial Sequence
  Synthetic
ugaagggauaugugaaaca

SEQ ID NO: 1024 - RNA, 19 nt, Artificial Sequence
  Synthetic
aauguuaacauuuuuggua

SEQ ID NO: 1025 - RNA, 19 nt, Artificial Sequence
  Synthetic
agucuucaaccagggauug

SEQ ID NO: 1026 - RNA, 19 nt, Artificial Sequence
  Synthetic
guuucuguuuaacuucuua

SEQ ID NO: 1027 - RNA, 19 nt, Artificial Sequence
  Synthetic
auaggaaagcuugaguaaa

SEQ ID NO: 1028 - RNA, 19 nt, Artificial Sequence
  Synthetic
aauaaauauugucuuuuug

SEQ ID NO: 1029 - RNA, 19 nt, Artificial Sequence
  Synthetic
auauugucuuuuuguaugu

SEQ ID NO: 1030 - RNA, 19 nt, Artificial Sequence
  Synthetic
ggccgggcuggagccuugg

SEQ ID NO: 1031 - RNA, 19 nt, Artificial Sequence
  Synthetic
ccucucgccucggagcccg

SEQ ID NO: 1032 - RNA, 19 nt, Artificial Sequence
  Synthetic
gccggccacuccaugcagc

SEQ ID NO: 1033 - RNA, 19 nt, Artificial Sequence
  Synthetic
cacagcccgcagagccgcg

SEQ ID NO: 1034 - RNA, 19 nt, Artificial Sequence
  Synthetic
gcgcagagcagcagcgccc

SEQ ID NO: 1035 - RNA, 19 nt, Artificial Sequence
  Synthetic
cccccgcccccgccgccgg

SEQ ID NO: 1036 - RNA, 19 nt, Artificial Sequence
  Synthetic
guaggcgcggcgcccccgc

SEQ ID NO: 1037 - RNA, 19 nt, Artificial Sequence
  Synthetic
acagguggcugaguuuccg

SEQ ID NO: 1038 - RNA, 19 nt, Artificial Sequence
  Synthetic
gagacacucaaauuuguca

SEQ ID NO: 1039 - RNA, 19 nt, Artificial Sequence
  Synthetic
gugcagagguuuucaacag

SEQ ID NO: 1040 - RNA, 19 nt, Artificial Sequence
  Synthetic
uuccauguccauauuacug

SEQ ID NO: 1041 - RNA, 19 nt, Artificial Sequence
  Synthetic
cuggcucccucggguggau

SEQ ID NO: 1042 - RNA, 19 nt, Artificial Sequence
  Synthetic
cauagacuacaauuugagc

SEQ ID NO: 1043 - RNA, 19 nt, Artificial Sequence
  Synthetic
ccaaaaugacuaaaauacc

SEQ ID NO: 1044 - RNA, 19 nt, Artificial Sequence
  Synthetic
uucuuaucuuguuugucgc

SEQ ID NO: 1045 - RNA, 19 nt, Artificial Sequence
  Synthetic
cgaguuuccggagcuauuu

SEQ ID NO: 1046 - RNA, 19 nt, Artificial Sequence
  Synthetic
gguacuucuauugaacgac

SEQ ID NO: 1047 - RNA, 19 nt, Artificial Sequence
  Synthetic
caaauccucucauucaggg

SEQ ID NO: 1048 - RNA, 19 nt, Artificial Sequence
  Synthetic
ugggaccccacuugcagac

SEQ ID NO: 1049 - RNA, 19 nt, Artificial Sequence
  Synthetic
cucucauuggugcuacacu

SEQ ID NO: 1050 - RNA, 19 nt, Artificial Sequence
  Synthetic
aaaaugcuaggcuucucac

SEQ ID NO: 1051 - RNA, 19 nt, Artificial Sequence
  Synthetic
gagaugcauuuuucaacca

SEQ ID NO: 1052 - RNA, 19 nt, Artificial Sequence
  Synthetic
ggaucaccuucugggggug

SEQ ID NO: 1053 - RNA, 19 nt, Artificial Sequence
  Synthetic
ucagucacagcagacucag

SEQ ID NO: 1054 - RNA, 19 nt, Artificial Sequence
  Synthetic
ugccaaaugcauugaagcu

SEQ ID NO: 1055 - RNA, 19 nt, Artificial Sequence
  Synthetic
uucauguagcucagguugu

SEQ ID NO: 1056 - RNA, 19 nt, Artificial Sequence
  Synthetic
ccagggagccaagaacacu

SEQ ID NO: 1057 - RNA, 19 nt, Artificial Sequence
  Synthetic
ucgggacugguauuccuuc

SEQ ID NO: 1058 - RNA, 19 nt, Artificial Sequence
  Synthetic
uagagaguauaguuagugu

SEQ ID NO: 1059 - RNA, 19 nt, Artificial Sequence
  Synthetic
aggcuucugugccaauagu

SEQ ID NO: 1060 - RNA, 19 nt, Artificial Sequence
  Synthetic
cauugaugaauuuuuucca

SEQ ID NO: 1061 - RNA, 19 nt, Artificial Sequence
  Synthetic
ucucuaaagauguuuucac

SEQ ID NO: 1062 - RNA, 19 nt, Artificial Sequence
  Synthetic
caaccaaaguauuggccuu

SEQ ID NO: 1063 - RNA, 19 nt, Artificial Sequence
  Synthetic
uuggucagaucaaaggaac

SEQ ID NO: 1064 - RNA, 19 nt, Artificial Sequence
  Synthetic
aaacuggaauccuucacuu

SEQ ID NO: 1065 - RNA, 19 nt, Artificial Sequence
  Synthetic
uggacacuguguuguucaa

SEQ ID NO: 1066 - RNA, 19 nt, Artificial Sequence
  Synthetic
uuauccuugaccauuauuu

SEQ ID NO: 1067 - RNA, 19 nt, Artificial Sequence
  Synthetic
gguuuaauuuuuccugcau

SEQ ID NO: 1068 - RNA, 19 nt, Artificial Sequence
  Synthetic
ggcacuauauugaaggaug

SEQ ID NO: 1069 - RNA, 19 nt, Artificial Sequence
  Synthetic
uucacacgggaaguuaaag

SEQ ID NO: 1070 - RNA, 19 nt, Artificial Sequence
  Synthetic
auauguggaggaucagguu

SEQ ID NO: 1071 - RNA, 19 nt, Artificial Sequence
  Synthetic
uggaaggagagguuuuuaa

SEQ ID NO: 1072 - RNA, 19 nt, Artificial Sequence
  Synthetic
acauauaggucaucauugu

SEQ ID NO: 1073 - RNA, 19 nt, Artificial Sequence
  Synthetic
uguggauucucccauugca

SEQ ID NO: 1074 - RNA, 19 nt, Artificial Sequence
  Synthetic
caucugcuaauaaaauucu

SEQ ID NO: 1075 - RNA, 19 nt, Artificial Sequence
  Synthetic
ucuacuucauaaaauaggc

SEQ ID NO: 1076 - RNA, 19 nt, Artificial Sequence
  Synthetic
guuuggcuguuauugacuu

SEQ ID NO: 1077 - RNA, 19 nt, Artificial Sequence
  Synthetic
aaaacauuaugugucucag

SEQ ID NO: 1078 - RNA, 19 nt, Artificial Sequence
  Synthetic
uuagccucuuggacguaga

SEQ ID NO: 1079 - RNA, 19 nt, Artificial Sequence
  Synthetic
aauucuggauucucacauu

SEQ ID NO: 1080 - RNA, 19 nt, Artificial Sequence
  Synthetic
uucuccacauuucucucaa

SEQ ID NO: 1081 - RNA, 19 nt, Artificial Sequence
  Synthetic
accaugaaacaagauguau

SEQ ID NO: 1082 - RNA, 19 nt, Artificial Sequence
  Synthetic
ucaggaagaacaccaggga

SEQ ID NO: 1083 - RNA, 19 nt, Artificial Sequence
  Synthetic
cugacuguguucaaaguau

SEQ ID NO: 1084 - RNA, 19 nt, Artificial Sequence
  Synthetic
uuuguuuugacucuuauuc

SEQ ID NO: 1085 - RNA, 19 nt, Artificial Sequence
  Synthetic
uccucauagcauaacuuau

SEQ ID NO: 1086 - RNA, 19 nt, Artificial Sequence
  Synthetic
uuacuccagaguuugucau

SEQ ID NO: 1087 - RNA, 19 nt, Artificial Sequence
  Synthetic
cucauuucuuggcuccaau

SEQ ID NO: 1088 - RNA, 19 nt, Artificial Sequence
  Synthetic
uugcgcuucuuaccuauac

SEQ ID NO: 1089 - RNA, 19 nt, Artificial Sequence
  Synthetic
guuauguagaguguggaau

SEQ ID NO: 1090 - RNA, 19 nt, Artificial Sequence
  Synthetic
ggaacaaugaguaacaugg

SEQ ID NO: 1091 - RNA, 19 nt, Artificial Sequence
  Synthetic
gcaccugcgacgaugacug

SEQ ID NO: 1092 - RNA, 19 nt, Artificial Sequence
  Synthetic
agcaggaguacuaugauug

SEQ ID NO: 1093 - RNA, 19 nt, Artificial Sequence
  Synthetic
uugagccuuuuuagguaaa

SEQ ID NO: 1094 - RNA, 19 nt, Artificial Sequence
  Synthetic
ggagggaauauaauaaucu

SEQ ID NO: 1095 - RNA, 19 nt, Artificial Sequence
  Synthetic
uugccaggaucaggaauug

SEQ ID NO: 1096 - RNA, 19 nt, Artificial Sequence
  Synthetic
aacauuucuuuaaaaaucu

SEQ ID NO: 1097 - RNA, 19 nt, Artificial Sequence
  Synthetic
ucaucauucuggucuccaa

SEQ ID NO: 1098 - RNA, 19 nt, Artificial Sequence
  Synthetic
uucuuccagugcagaguau

SEQ ID NO: 1099 - RNA, 19 nt, Artificial Sequence
  Synthetic
uucucauagaugucguacu

SEQ ID NO: 1100 - RNA, 19 nt, Artificial Sequence
  Synthetic
guuuccuccuugguuugcu

SEQ ID NO: 1101 - RNA, 19 nt, Artificial Sequence
  Synthetic
aucagcacuacagagucgg

SEQ ID NO: 1102 - RNA, 19 nt, Artificial Sequence
  Synthetic
gcuuucuucagguuuucua

SEQ ID NO: 1103 - RNA, 19 nt, Artificial Sequence
  Synthetic
uaucuccaucacugagagg

SEQ ID NO: 1104 - RNA, 19 nt, Artificial Sequence
  Synthetic
gugaagguaaaaauaaauu

SEQ ID NO: 1105 - RNA, 19 nt, Artificial Sequence
  Synthetic
aaucuucucaaggucacag

SEQ ID NO: 1106 - RNA, 19 nt, Artificial Sequence
  Synthetic
caaauggagaaugggaaga

SEQ ID NO: 1107 - RNA, 19 nt, Artificial Sequence
  Synthetic
uaauaaguucccagauaac

SEQ ID NO: 1108 - RNA, 19 nt, Artificial Sequence
  Synthetic
guaguuucaguuuccauuu

SEQ ID NO: 1109 - RNA, 19 nt, Artificial Sequence
  Synthetic
cuguuuuuaaauggugcag

SEQ ID NO: 1110 - RNA, 19 nt, Artificial Sequence
  Synthetic
guggcucuuaugagcugcc

SEQ ID NO: 1111 - RNA, 19 nt, Artificial Sequence
  Synthetic
gacucaacauaaagaccug

SEQ ID NO: 1112 - RNA, 19 nt, Artificial Sequence
  Synthetic
uuuaguuuuucggugcgcg

SEQ ID NO: 1113 - RNA, 19 nt, Artificial Sequence
  Synthetic
uccaaagcgcccauuauuu

SEQ ID NO: 1114 - RNA, 19 nt, Artificial Sequence
  Synthetic
aaugacuccacacucuucu

SEQ ID NO: 1115 - RNA, 19 nt, Artificial Sequence
  Synthetic
cuuuuauaauucaaugaga

SEQ ID NO: 1116 - RNA, 19 nt, Artificial Sequence
  Synthetic
uaguuugaagccugcuggc

SEQ ID NO: 1117 - RNA, 19 nt, Artificial Sequence
  Synthetic
acuuuuugcuuuguccccu

SEQ ID NO: 1118 - RNA, 19 nt, Artificial Sequence
  Synthetic
aacuccaccacuaucauca

SEQ ID NO: 1119 - RNA, 19 nt, Artificial Sequence
  Synthetic
acaacucuugauaagauua

SEQ ID NO: 1120 - RNA, 19 nt, Artificial Sequence
  Synthetic
aucccucaggaaguuguca

SEQ ID NO: 1121 - RNA, 19 nt, Artificial Sequence
  Synthetic
aacacaaagcaaguauaga

SEQ ID NO: 1122 - RNA, 19 nt, Artificial Sequence
  Synthetic
guucauguugacacaaaga

SEQ ID NO: 1123 - RNA, 19 nt, Artificial Sequence
  Synthetic
ccccuacaaauaaaauuug

SEQ ID NO: 1124 - RNA, 19 nt, Artificial Sequence
  Synthetic
uugcaccccaaaugaguuc

SEQ ID NO: 1125 - RNA, 19 nt, Artificial Sequence
  Synthetic
caaguuugacauuagcauu

SEQ ID NO: 1126 - RNA, 19 nt, Artificial Sequence
  Synthetic
uacauguucuuugugacuc

SEQ ID NO: 1127 - RNA, 19 nt, Artificial Sequence
  Synthetic
uuuauccauuuuguuuucu

SEQ ID NO: 1128 - RNA, 19 nt, Artificial Sequence
  Synthetic
aaacaauacauaucagauu

SEQ ID NO: 1129 - RNA, 19 nt, Artificial Sequence
  Synthetic
augguucaauaggauccca

SEQ ID NO: 1130 - RNA, 19 nt, Artificial Sequence
  Synthetic
guuuuaauagccacaaaca

SEQ ID NO: 1131 - RNA, 19 nt, Artificial Sequence
  Synthetic
gcccagacuguuaaaagag

SEQ ID NO: 1132 - RNA, 19 nt, Artificial Sequence
  Synthetic
cgugagccaccggacccag

SEQ ID NO: 1133 - RNA, 19 nt, Artificial Sequence
  Synthetic
aauugcugggauuacaggc

SEQ ID NO: 1134 - RNA, 19 nt, Artificial Sequence
  Synthetic
gcccgccucggacucccaa

SEQ ID NO: 1135 - RNA, 19 nt, Artificial Sequence
  Synthetic
ccugaccucgagugauccg

SEQ ID NO: 1136 - RNA, 19 nt, Artificial Sequence
  Synthetic
ucaggcuggucuggaacuc

SEQ ID NO: 1137 - RNA, 19 nt, Artificial Sequence
  Synthetic
gagguuucaccauuuuggu

SEQ ID NO: 1138 - RNA, 19 nt, Artificial Sequence
  Synthetic
uguaguuuuaguagagagg

SEQ ID NO: 1139 - RNA, 19 nt, Artificial Sequence
  Synthetic
ccacacccaguuaauuuuu

SEQ ID NO: 1140 - RNA, 19 nt, Artificial Sequence
  Synthetic
gauuacaggcacgcgccac

SEQ ID NO: 1141 - RNA, 19 nt, Artificial Sequence
  Synthetic
agcuucccgaguagcuggg

SEQ ID NO: 1142 - RNA, 19 nt, Artificial Sequence
  Synthetic
aaacaauucaccugccuca

SEQ ID NO: 1143 - RNA, 19 nt, Artificial Sequence
  Synthetic
ccuccaccucccagguuca

SEQ ID NO: 1144 - RNA, 19 nt, Artificial Sequence
  Synthetic
gaucucugcucacugcaac

SEQ ID NO: 1145 - RNA, 19 nt, Artificial Sequence
  Synthetic
gcuagagugcaguggugug

SEQ ID NO: 1146 - RNA, 19 nt, Artificial Sequence
  Synthetic
ucuugcucugucacccagg

SEQ ID NO: 1147 - RNA, 19 nt, Artificial Sequence
  Synthetic
uuuguuuuuuagacagagu

SEQ ID NO: 1148 - RNA, 19 nt, Artificial Sequence
  Synthetic
uguuuuguuuuguuuuguu

SEQ ID NO: 1149 - RNA, 19 nt, Artificial Sequence
  Synthetic
aauauuaagagguuuuuuu

SEQ ID NO: 1150 - RNA, 19 nt, Artificial Sequence
  Synthetic
agggaaugaugacuccaga

SEQ ID NO: 1151 - RNA, 19 nt, Artificial Sequence
  Synthetic
agaggaaaaugcugucgaa

SEQ ID NO: 1152 - RNA, 19 nt, Artificial Sequence
  Synthetic
uucuggggcuuucaaagca

SEQ ID NO: 1153 - RNA, 19 nt, Artificial Sequence
  Synthetic
aucauggccaacacugauu

SEQ ID NO: 1154 - RNA, 19 nt, Artificial Sequence
  Synthetic
gguuuuucuguaguuguca

SEQ ID NO: 1155 - RNA, 19 nt, Artificial Sequence
  Synthetic
ggcaaagaagcugccucug

SEQ ID NO: 1156 - RNA, 19 nt, Artificial Sequence
  Synthetic
auggcuuugaaaggucuug

SEQ ID NO: 1157 - RNA, 19 nt, Artificial Sequence
  Synthetic
ugccccuaacagccuaaaa

SEQ ID NO: 1158 - RNA, 19 nt, Artificial Sequence
  Synthetic
gagucauucuaccuccacu

SEQ ID NO: 1159 - RNA, 19 nt, Artificial Sequence
  Synthetic
gaaacucuaauacccaagg

SEQ ID NO: 1160 - RNA, 19 nt, Artificial Sequence
  Synthetic
guuagagacuucaugguug

SEQ ID NO: 1161 - RNA, 19 nt, Artificial Sequence
  Synthetic
aggugaagaaaauacauug

SEQ ID NO: 1162 - RNA, 19 nt, Artificial Sequence
  Synthetic
augcuacuugaguagcaga

SEQ ID NO: 1163 - RNA, 19 nt, Artificial Sequence
  Synthetic
aaaccaaagacacaguaaa

SEQ ID NO: 1164 - RNA, 19 nt, Artificial Sequence
  Synthetic
cacccgggggccuagcaca

SEQ ID NO: 1165 - RNA, 19 nt, Artificial Sequence
  Synthetic
gaaggggucugugcuucac

SEQ ID NO: 1166 - RNA, 19 nt, Artificial Sequence
  Synthetic
auagacuguaaaccccugg

SEQ ID NO: 1167 - RNA, 19 nt, Artificial Sequence
  Synthetic
agaacugaggagucucaaa

SEQ ID NO: 1168 - RNA, 19 nt, Artificial Sequence
  Synthetic
uuaaaaaaaaaaguggcaa

SEQ ID NO: 1169 - RNA, 19 nt, Artificial Sequence
  Synthetic
aaaaaugacugguggagau

SEQ ID NO: 1170 - RNA, 19 nt, Artificial Sequence
  Synthetic
gaggaguuaaaaggucuga

SEQ ID NO: 1171 - RNA, 19 nt, Artificial Sequence
  Synthetic
gaaaucaguguuggaauug

SEQ ID NO: 1172 - RNA, 19 nt, Artificial Sequence
  Synthetic
agggagaaugcaaaagggg

SEQ ID NO: 1173 - RNA, 19 nt, Artificial Sequence
  Synthetic
gcuacaaggaagggaagga

SEQ ID NO: 1174 - RNA, 19 nt, Artificial Sequence
  Synthetic
uccaaugaaagucaaaagg

SEQ ID NO: 1175 - RNA, 19 nt, Artificial Sequence
  Synthetic
cagauuuacauccuaauuu

SEQ ID NO: 1176 - RNA, 19 nt, Artificial Sequence
  Synthetic
uccuccaggucuccugagc

SEQ ID NO: 1177 - RNA, 19 nt, Artificial Sequence
  Synthetic
augcuaauuauccucugcu

SEQ ID NO: 1178 - RNA, 19 nt, Artificial Sequence
  Synthetic
acucacacuuaaccugaga

SEQ ID NO: 1179 - RNA, 19 nt, Artificial Sequence
  Synthetic
gucauuguuucucagauua

SEQ ID NO: 1180 - RNA, 19 nt, Artificial Sequence
  Synthetic
caaaauaugcaagaauuag

SEQ ID NO: 1181 - RNA, 19 nt, Artificial Sequence
  Synthetic
acccucacauggaaguuac

SEQ ID NO: 1182 - RNA, 19 nt, Artificial Sequence
  Synthetic
caaauaucaaugcugaaaa

SEQ ID NO: 1183 - RNA, 19 nt, Artificial Sequence
  Synthetic
cucuguuuagaaaaugcac

SEQ ID NO: 1184 - RNA, 19 nt, Artificial Sequence
  Synthetic
gugaagauaccaccucauc

SEQ ID NO: 1185 - RNA, 19 nt, Artificial Sequence
  Synthetic
cgaauaccaauguucuacg

SEQ ID NO: 1186 - RNA, 19 nt, Artificial Sequence
  Synthetic
uauucuuuuuuucucaagc

SEQ ID NO: 1187 - RNA, 19 nt, Artificial Sequence
  Synthetic
aagagaaauagguucaacu

SEQ ID NO: 1188 - RNA, 19 nt, Artificial Sequence
  Synthetic
ggacccaucuuguaaagaa

SEQ ID NO: 1189 - RNA, 19 nt, Artificial Sequence
  Synthetic
agagaaaagaggaauccug

SEQ ID NO: 1190 - RNA, 19 nt, Artificial Sequence
  Synthetic
uaauuaaucauuuauggca

SEQ ID NO: 1191 - RNA, 19 nt, Artificial Sequence
  Synthetic
uaagacacaaaagcuauuu

SEQ ID NO: 1192 - RNA, 19 nt, Artificial Sequence
  Synthetic
gcuggcuggcuaccaaugu

SEQ ID NO: 1193 - RNA, 19 nt, Artificial Sequence
  Synthetic
agcauaaacagagccuugg

SEQ ID NO: 1194 - RNA, 19 nt, Artificial Sequence
  Synthetic
caauauaugccccccaaaa

SEQ ID NO: 1195 - RNA, 19 nt, Artificial Sequence
  Synthetic
auaggugagaauggaaccc

SEQ ID NO: 1196 - RNA, 19 nt, Artificial Sequence
  Synthetic
uacggauauguugugugga

SEQ ID NO: 1197 - RNA, 19 nt, Artificial Sequence
  Synthetic
aagaguagaggggauauau

SEQ ID NO: 1198 - RNA, 19 nt, Artificial Sequence
  Synthetic
uuuaaauuugggggaagua

SEQ ID NO: 1199 - RNA, 19 nt, Artificial Sequence
  Synthetic
ucucauuucccauacuucu

SEQ ID NO: 1200 - RNA, 19 nt, Artificial Sequence
  Synthetic
uggggugggggaaaugccu

SEQ ID NO: 1201 - RNA, 19 nt, Artificial Sequence
  Synthetic
ugugugugaggagagaaau

SEQ ID NO: 1202 - RNA, 19 nt, Artificial Sequence
  Synthetic
cuaccaguaauaugagucu

SEQ ID NO: 1203 - RNA, 19 nt, Artificial Sequence
  Synthetic
aauaaaguucucaaguucc

SEQ ID NO: 1204 - RNA, 19 nt, Artificial Sequence
  Synthetic
auguuugaacaacuuggaa

SEQ ID NO: 1205 - RNA, 19 nt, Artificial Sequence
  Synthetic
uauuaauaugauugguaaa

SEQ ID NO: 1206 - RNA, 19 nt, Artificial Sequence
  Synthetic
uugcaaauagcaucauugu

SEQ ID NO: 1207 - RNA, 19 nt, Artificial Sequence
  Synthetic
cuccccuaggagcaggaau

SEQ ID NO: 1208 - RNA, 19 nt, Artificial Sequence
  Synthetic
gaggguuucuuaucucccc

SEQ ID NO: 1209 - RNA, 19 nt, Artificial Sequence
  Synthetic
cccaaaccuguagagagug

SEQ ID NO: 1210 - RNA, 19 nt, Artificial Sequence
  Synthetic
agcagguugccacuuguac

SEQ ID NO: 1211 - RNA, 19 nt, Artificial Sequence
  Synthetic
cuucuacacggccauggaa

SEQ ID NO: 1212 - RNA, 19 nt, Artificial Sequence
  Synthetic
agaagccagggcaccaugc

SEQ ID NO: 1213 - RNA, 19 nt, Artificial Sequence
  Synthetic
gaaccccagcuuccucaga

SEQ ID NO: 1214 - RNA, 19 nt, Artificial Sequence
  Synthetic
uacaucugccauugucaug

SEQ ID NO: 1215 - RNA, 19 nt, Artificial Sequence
  Synthetic
ugacuucaagaauaacuuu

SEQ ID NO: 1216 - RNA, 19 nt, Artificial Sequence
  Synthetic
ugucucccagccucaaucu

SEQ ID NO: 1217 - RNA, 19 nt, Artificial Sequence
  Synthetic
uagaacaucuacuacggcu

SEQ ID NO: 1218 - RNA, 19 nt, Artificial Sequence
  Synthetic
gagaacagcagaacaaagu

SEQ ID NO: 1219 - RNA, 19 nt, Artificial Sequence
  Synthetic
aaccaaauauucuuucuag

SEQ ID NO: 1220 - RNA, 19 nt, Artificial Sequence
  Synthetic
cucauuccuauacaggaaa

SEQ ID NO: 1221 - RNA, 19 nt, Artificial Sequence
  Synthetic
accuggaaaggaauuaauc

SEQ ID NO: 1222 - RNA, 19 nt, Artificial Sequence
  Synthetic
uucccagaauuauaaaaua

SEQ ID NO: 1223 - RNA, 19 nt, Artificial Sequence
  Synthetic
gggaggcauggguuuugcu

SEQ ID NO: 1224 - RNA, 19 nt, Artificial Sequence
  Synthetic
acaguaaaaauggcuaggg

SEQ ID NO: 1225 - RNA, 19 nt, Artificial Sequence
  Synthetic
ggccaucuaaauaggauaa

SEQ ID NO: 1226 - RNA, 19 nt, Artificial Sequence
  Synthetic
ucacagcauccucuucaug

SEQ ID NO: 1227 - RNA, 19 nt, Artificial Sequence
  Synthetic
caauguuuguugggaauuu

SEQ ID NO: 1228 - RNA, 19 nt, Artificial Sequence
  Synthetic
cugcaugacugucagcauc

SEQ ID NO: 1229 - RNA, 19 nt, Artificial Sequence
  Synthetic
cacuuccccacucccagac

SEQ ID NO: 1230 - RNA, 19 nt, Artificial Sequence
  Synthetic
aggaugggaacaaaagauc

SEQ ID NO: 1231 - RNA, 19 nt, Artificial Sequence
  Synthetic
uuuuacugcuaaaagaaga

SEQ ID NO: 1232 - RNA, 19 nt, Artificial Sequence
  Synthetic
ucccuuuucccucagcuau

SEQ ID NO: 1233 - RNA, 19 nt, Artificial Sequence
  Synthetic
ccauaacuuccuuuucccu

SEQ ID NO: 1234 - RNA, 19 nt, Artificial Sequence
  Synthetic
caaccaccacagguauucc

SEQ ID NO: 1235 - RNA, 19 nt, Artificial Sequence
  Synthetic
cccaagaccuagggaucac

SEQ ID NO: 1236 - RNA, 19 nt, Artificial Sequence
  Synthetic
cagacaccuccaagagcuc

SEQ ID NO: 1237 - RNA, 19 nt, Artificial Sequence
  Synthetic
augggaaauccacugauac

SEQ ID NO: 1238 - RNA, 19 nt, Artificial Sequence
  Synthetic
acuaauuucccacagggga

SEQ ID NO: 1239 - RNA, 19 nt, Artificial Sequence
  Synthetic
aaaacaguaaaugagccua

SEQ ID NO: 1240 - RNA, 19 nt, Artificial Sequence
  Synthetic
uccacauaggcuagaccua

SEQ ID NO: 1241 - RNA, 19 nt, Artificial Sequence
  Synthetic
agguauguuaggaaaaaau

SEQ ID NO: 1242 - RNA, 19 nt, Artificial Sequence
  Synthetic
cugacacuggguuugcuua

SEQ ID NO: 1243 - RNA, 19 nt, Artificial Sequence
  Synthetic
agaauaagaauuaccaucc

SEQ ID NO: 1244 - RNA, 19 nt, Artificial Sequence
  Synthetic
aaaacuuaacugaacgaaa

SEQ ID NO: 1245 - RNA, 19 nt, Artificial Sequence
  Synthetic
agugcccagaugaagggaa

SEQ ID NO: 1246 - RNA, 19 nt, Artificial Sequence
  Synthetic
uguuucacauaucccuuca

SEQ ID NO: 1247 - RNA, 19 nt, Artificial Sequence
  Synthetic
uaccaaaaauguuaacauu

SEQ ID NO: 1248 - RNA, 19 nt, Artificial Sequence
  Synthetic
caaucccugguugaagacu

SEQ ID NO: 1249 - RNA, 19 nt, Artificial Sequence
  Synthetic
uaagaaguuaaacagaaac

SEQ ID NO: 1250 - RNA, 19 nt, Artificial Sequence
  Synthetic
uuuacucaagcuuuccuau

SEQ ID NO: 1251 - RNA, 19 nt, Artificial Sequence
  Synthetic
caaaaagacaauauuuauu

SEQ ID NO: 1252 - RNA, 19 nt, Artificial Sequence
  Synthetic
acauacaaaaagacaauau

SEQ ID NO: 1253 - RNA, 23 nt, Artificial Sequence
  Synthetic
acaccacagcugauuucuuccug

SEQ ID NO: 1254 - RNA, 23 nt, Artificial Sequence
  Synthetic
auuucuuccugaccacuaugccc

SEQ ID NO: 1255 - RNA, 23 nt, Artificial Sequence
  Synthetic
cugaccacuaugcccacugacuc

SEQ ID NO: 1256 - RNA, 23 nt, Artificial Sequence
  Synthetic
ugacucccucaguguuuccacuc

SEQ ID NO: 1257 - RNA, 23 nt, Artificial Sequence
  Synthetic
ccaaccucacucugcauuauugg

SEQ ID NO: 1258 - RNA, 23 nt, Artificial Sequence
  Synthetic
ugauaaaguccagaagugcagcc

SEQ ID NO: 1259 - RNA, 23 nt, Artificial Sequence
  Synthetic
gauaaaguccagaagugcagcca

SEQ ID NO: 1260 - RNA, 23 nt, Artificial Sequence
  Synthetic
aaucacuucuggcugucaguugc

SEQ ID NO: 1261 - RNA, 3 nt, Artificial Sequence
  Synthetic
aaa

SEQ ID NO: 1262 - RNA, 3 nt, Artificial Sequence
  Synthetic
aaa

SEQ ID NO: 1263 - RNA, 3 nt, Artificial Sequence
  Synthetic
aaa

SEQ ID NO: 1264 - RNA, 3 nt, Artificial Sequence
  Synthetic
aaa

SEQ ID NO: 1265 - RNA, 3 nt, Artificial Sequence
  Synthetic
aaa

SEQ ID NO: 1266 - RNA, 3 nt, Artificial Sequence
  Synthetic
aaa

SEQ ID NO: 1267 - RNA, 3 nt, Artificial Sequence
  Synthetic
aaa

SEQ ID NO: 1268 - RNA, 3 nt, Artificial Sequence
  Synthetic
aaa

SEQ ID NO: 1269 - RNA, 23 nt, Artificial Sequence
  Synthetic
cagccucacagagcagaagacuc

SEQ ID NO: 1270 - RNA, 23 nt, Artificial Sequence
  Synthetic
gccucacagagcagaagacucug

SEQ ID NO: 1271 - RNA, 23 nt, Artificial Sequence
  Synthetic
ccgaguugaccguaacagacauc

SEQ ID NO: 1272 - RNA, 23 nt, Artificial Sequence
  Synthetic
cguaacagacaucuuugcugccu

SEQ ID NO: 1273 - RNA, 23 nt, Artificial Sequence
  Synthetic
gccuccaagaacacaacugagaa

SEQ ID NO: 1274 - RNA, 23 nt, Artificial Sequence
  Synthetic
ucuacagccaccaugagaaggac

SEQ ID NO: 1275 - RNA, 23 nt, Artificial Sequence
  Synthetic
uugaauuccuguccugugaagga

SEQ ID NO: 1276 - RNA, 23 nt, Artificial Sequence
  Synthetic
gaaggaagccaaccagaguacgu

SEQ ID NO: 1277 - RNA, 23 nt, Artificial Sequence
  Synthetic
cuauacacuggaccugugggcug

SEQ ID NO: 1278 - RNA, 23 nt, Artificial Sequence
  Synthetic
ccaggaaaccugacaguucacac

SEQ ID NO: 1279 - RNA, 23 nt, Artificial Sequence
  Synthetic
agcacaacaugaaaagggaugaa

SEQ ID NO: 1280 - RNA, 23 nt, Artificial Sequence
  Synthetic
gcacaacaugaaaagggaugaag

SEQ ID NO: 1281 - RNA, 23 nt, Artificial Sequence
  Synthetic
aagggaugaagauccucacaagg

SEQ ID NO: 1282 - RNA, 23 nt, Artificial Sequence
  Synthetic
uugggaaaucgaugagaaauuga

SEQ ID NO: 1283 - RNA, 23 nt, Artificial Sequence
  Synthetic
ugggaaaucgaugagaaauugaa

SEQ ID NO: 1284 - RNA, 23 nt, Artificial Sequence
  Synthetic
ucauugccuagaggugcucauuc

SEQ ID NO: 1285 - RNA, 23 nt, Artificial Sequence
  Synthetic
cccaguuuguaaaggaccugcuc

SEQ ID NO: 1286 - RNA, 23 nt, Artificial Sequence
  Synthetic
cacuucacacacaggcaacugag

SEQ ID NO: 1287 - RNA, 23 nt, Artificial Sequence
  Synthetic
ucaggcacacuucuucuuggucu

SEQ ID NO: 1288 - RNA, 23 nt, Artificial Sequence
  Synthetic
aagacuguggcugcuagcacuug

SEQ ID NO: 1289 - RNA, 23 nt, Artificial Sequence
  Synthetic
agcacuaaagcaguggacaccag

SEQ ID NO: 1290 - RNA, 23 nt, Artificial Sequence
  Synthetic
cacuaaagcaguggacaccagga

SEQ ID NO: 1291 - RNA, 23 nt, Artificial Sequence
  Synthetic
uaaagcaguggacaccaggaguc

SEQ ID NO: 1292 - RNA, 23 nt, Artificial Sequence
  Synthetic
agaaggguaccuugaacacuggg

SEQ ID NO: 1293 - RNA, 23 nt, Artificial Sequence
  Synthetic
uauuguguguuauuuaaaugagu

SEQ ID NO: 1294 - RNA, 23 nt, Artificial Sequence
  Synthetic
auuguguguuauuuaaaugagug

SEQ ID NO: 1295 - RNA, 23 nt, Artificial Sequence
  Synthetic
uuguguguuauuuaaaugagugu

SEQ ID NO: 1296 - RNA, 23 nt, Artificial Sequence
  Synthetic
uuauuguguguuauuuaaaugag

SEQ ID NO: 1297 - RNA, 23 nt, Artificial Sequence
  Synthetic
ugcaauggcagcaugguauggag

SEQ ID NO: 1298 - RNA, 23 nt, Artificial Sequence
  Synthetic
gcaauggcagcaugguauggagc

SEQ ID NO: 1299 - RNA, 23 nt, Artificial Sequence
  Synthetic
caauggcagcaugguauggagca

SEQ ID NO: 1300 - RNA, 23 nt, Artificial Sequence
  Synthetic
uuauuauuguguguuauuuaaau

SEQ ID NO: 1301 - RNA, 23 nt, Artificial Sequence
  Synthetic
uauuauuguguguuauuuaaaug

SEQ ID NO: 1302 - RNA, 23 nt, Artificial Sequence
  Synthetic
auuauuguguguuauuuaaauga

SEQ ID NO: 1303 - RNA, 23 nt, Artificial Sequence
  Synthetic
aaggugauccugagucugcugug

SEQ ID NO: 1304 - RNA, 23 nt, Artificial Sequence
  Synthetic
uggucaaggauaaugcaggaaaa

SEQ ID NO: 1305 - RNA, 23 nt, Artificial Sequence
  Synthetic
cguccaagaggcuaaaugugaga

SEQ ID NO: 1306 - RNA, 23 nt, Artificial Sequence
  Synthetic
ggaaaccgacucuguagugcuga

SEQ ID NO: 1307 - RNA, 23 nt, Artificial Sequence
  Synthetic
ugaagaaagccucucagugaugg

SEQ ID NO: 1308 - RNA, 23 nt, Artificial Sequence
  Synthetic
acugcaccauuuaaaaacaggca

SEQ ID NO: 1309 - RNA, 23 nt, Artificial Sequence
  Synthetic
cagcauuuuccucugcuuugaaa

SEQ ID NO: 1310 - RNA, 23 nt, Artificial Sequence
  Synthetic
ccaagaccuuucaaagccauuuu

SEQ ID NO: 1311 - DNA, 21 bp, Artificial Sequence
  Synthetic
  misc_feature (1)..(19): RNA
accacagcugauuucuucctt

SEQ ID NO: 1312 - DNA, 21 bp, Artificial Sequence
  Synthetic
  misc_feature (1)..(19): RNA
uucuuccugaccacuaugctt

SEQ ID NO: 1313 - DNA, 21 bp, Artificial Sequence
  Synthetic
  misc_feature (1)..(19): RNA
gaccacuaugcccacugactt

SEQ ID NO: 1314 - DNA, 21 bp, Artificial Sequence
  Synthetic
  misc_feature (1)..(19): RNA
acucccucaguguuuccactt

SEQ ID NO: 1315 - DNA, 21 bp, Artificial Sequence
  Synthetic
  misc_feature (1)..(19): RNA
aaccucacucugcauuauutt

SEQ ID NO: 1316 - DNA, 21 bp, Artificial Sequence
  Synthetic
  misc_feature (1)..(19): RNA
auaaaguccagaagugcagtt

SEQ ID NO: 1317 - DNA, 21 bp, Artificial Sequence
  Synthetic
  misc_feature (1)..(19): RNA
uaaaguccagaagugcagctt

SEQ ID NO: 1318 - DNA, 21 bp, Artificial Sequence
  Synthetic
  misc_feature (1)..(19): RNA
ucacuucuggcugucaguutt

SEQ ID NO: 1319 - DNA, 21 bp, Artificial Sequence
  Synthetic
  misc_feature (1)..(19): RNA
ggaagaaaucagcuguggutt

SEQ ID NO: 1320 - DNA, 21 bp, Artificial Sequence
  Synthetic
  misc_feature (1)..(19): RNA
gcauaguggucaggaagaatt

SEQ ID NO: 1321 - DNA, 21 bp, Artificial Sequence
  Synthetic
  misc_feature (1)..(19): RNA
gucagugggcauagugguctt

SEQ ID NO: 1322 - DNA, 21 bp, Artificial Sequence
  Synthetic
  misc_feature (1)..(19): RNA
guggaaacacugagggagutt

SEQ ID NO: 1323 - DNA, 21 bp, Artificial Sequence
  Synthetic
  misc_feature (1)..(19): RNA
aauaaugcagagugagguutt

SEQ ID NO: 1324 - DNA, 21 bp, Artificial Sequence
  Synthetic
  misc_feature (1)..(19): RNA
cugcacuucuggacuuuautt

SEQ ID NO: 1325 - DNA, 21 bp, Artificial Sequence
  Synthetic
  misc_feature (1)..(19): RNA
gcugcacuucuggacuuuatt

SEQ ID NO: 1326 - DNA, 21 bp, Artificial Sequence
  Synthetic
  misc_feature (1)..(19): RNA
aacugacagccagaagugatt

SEQ ID NO: 1327 - DNA, 21 bp, Artificial Sequence
  Synthetic
  misc_feature (1)..(1): 5'-3 attached terminal deoxyabasic moeity
  misc_feature (2)..(3): 2'-deoxy-2'-fluoro
  misc_feature (5)..(5): 2'-deoxy-2'-fluoro
  misc_feature (8)..(9): 2'-deoxy-2'-fluoro
  misc_feature (12)..(19): 2'-deoxy-2'-fluoro
  misc_feature (1)..(19): RNA
  misc_feature (21)..(21): 3'-3 attached terminal deoxyabasic moeity
accacagcugauuucuucctt

SEQ ID NO: 1328 - DNA, 21 bp, Artificial Sequence
  Synthetic
  misc_feature (1)..(1): 5'-3 attached terminal deoxyabasic moeity
  misc_feature (1)..(8): 2'-deoxy-2'-fluoro
  misc_feature (11)..(12): 2'-deoxy-2'-fluoro
  misc_feature (14)..(15): 2'-deoxy-2'-fluoro
  misc_feature (17)..(17): 2'-deoxy-2'-fluoro
  misc_feature (19)..(19): 2'-deoxy-2'-fluoro
  misc_feature (1)..(19): RNA
  misc_feature (21)..(21): 3'-3 attached terminal deoxyabasic moeity
uucuuccugaccacuaugctt

SEQ ID NO: 1329 - DNA, 21 bp, Artificial Sequence
  Synthetic
  misc_feature (1)..(1): 5'-3 attached terminal deoxyabasic moeity
  misc_feature (3)..(4): 2'-deoxy-2'-fluoro
  misc_feature (6)..(7): 2'-deoxy-2'-fluoro
  misc_feature (9)..(9): 2'-deoxy-2'-fluoro
  misc_feature (11)..(13): 2'-deoxy-2'-fluoro
  misc_feature (15)..(16): 2'-deoxy-2'-fluoro
  misc_feature (19)..(19): 2'-deoxy-2'-fluoro
  misc_feature (1)..(19): RNA
  misc_feature (21)..(21): 3'-3 attached terminal deoxyabasic moeity
gaccacuaugcccacugactt

SEQ ID NO: 1330 - DNA, 21 bp, Artificial Sequence
  Synthetic
  misc_feature (1)..(1): 5'-3 attached terminal deoxyabasic moeity
  misc_feature (2)..(8): 2'-deoxy-2'-fluoro
  misc_feature (11)..(11): 2'-deoxy-2'-fluoro
  misc_feature (13)..(17): 2'-deoxy-2'-fluoro
  misc_feature (19)..(19): 2'-deoxy-2'-fluoro
  misc_feature (1)..(19): RNA
  misc_feature (21)..(21): 3'-3 attached terminal deoxyabasic moeity
acucccucaguguuuccactt

SEQ ID NO: 1331 - DNA, 21 bp, Artificial Sequence
  Synthetic
  misc_feature (1)..(1): 5'-3 attached terminal deoxyabasic moeity
  misc_feature (3)..(6): 2'-deoxy-2'-fluoro
  misc_feature (8)..(11): 2'-deoxy-2'-fluoro
  misc_feature (13)..(13): 2'-deoxy-2'-fluoro
  misc_feature (15)..(16): 2'-deoxy-2'-fluoro
  misc_feature (18)..(19): 2'-deoxy-2'-fluoro
  misc_feature (1)..(19): RNA
  misc_feature (21)..(21): 3'-3 attached terminal deoxyabasic moeity
aaccucacucugcauuauutt

SEQ ID NO: 1332 - DNA, 21 bp, Artificial Sequence
  Synthetic
  misc_feature (1)..(1): 5'-3 attached terminal deoxyabasic moeity
  misc_feature (2)..(2): 2'-deoxy-2'-fluoro
  misc_feature (7)..(9): 2'-deoxy-2'-fluoro
  misc_feature (15)..(15): 2'-deoxy-2'-fluoro
  misc_feature (17)..(17): 2'-deoxy-2'-fluoro
  misc_feature (1)..(19): RNA
  misc_feature (21)..(21): 3'-3 attached terminal deoxyabasic moeity
auaaaguccagaagugcagtt

SEQ ID NO: 1333 - DNA, 21 bp, Artificial Sequence
  Synthetic
  misc_feature (1)..(1): 5'-3 attached terminal deoxyabasic moeity
  misc_feature (1)..(1): 2'-deoxy-2'-fluoro
  misc_feature (6)..(8): 2'-deoxy-2'-fluoro
  misc_feature (14)..(14): 2'-deoxy-2'-fluoro
  misc_feature (16)..(16): 2'-deoxy-2'-fluoro
  misc_feature (19)..(19): 2'-deoxy-2'-fluoro
  misc_feature (1)..(19): RNA
  misc_feature (21)..(21): 3'-3 attached terminal deoxyabasic moeity
uaaaguccagaagugcagctt

SEQ ID NO: 1334 - DNA, 21 bp, Artificial Sequence
  Synthetic
  misc_feature (1)..(1): 5'-3 attached terminal deoxyabasic moeity
  misc_feature (1)..(2): 2'-deoxy-2'-fluoro
  misc_feature (4)..(8): 2'-deoxy-2'-fluoro
  misc_feature (11)..(12): 2'-deoxy-2'-fluoro
  misc_feature (14)..(15): 2'-deoxy-2'-fluoro
  misc_feature (18)..(19): 2'-deoxy-2'-fluoro
  misc_feature (1)..(19): RNA
  misc_feature (21)..(21): 3'-3 attached terminal deoxyabasic moeity
ucacuucuggcugucaguutt

SEQ ID NO: 1335 - DNA, 21 bp, Artificial Sequence
  Synthetic
  misc_feature (9)..(10): 2'-deoxy-2'-fluoro
  misc_feature (13)..(14): 2'-deoxy-2'-fluoro
  misc_feature (16)..(16): 2'-deoxy-2'-fluoro
  misc_feature (19)..(19): 2'-deoxy-2'-fluoro
  misc_feature (20)..(20): Phosphorothioate 3'-Internucleotide Linkage
  misc_feature (1)..(19): RNA
ggaagaaaucagcuguggutt

SEQ ID NO: 1336 - DNA, 21 bp, Artificial Sequence
  Synthetic
  misc_feature (2)..(2): 2'-deoxy-2'-fluoro
  misc_feature (4)..(4): 2'-deoxy-2'-fluoro
  misc_feature (7)..(7): 2'-deoxy-2'-fluoro
  misc_feature (10)..(11): 2'-deoxy-2'-fluoro
  misc_feature (20)..(20): Phosphorothioate 3'-Internucleotide Linkage
  misc_feature (1)..(19): RNA
gcauaguggucaggaagaatt

SEQ ID NO: 1337 - DNA, 21 bp, Artificial Sequence
  Synthetic
  misc_feature (2)..(3): 2'-deoxy-2'-fluoro
  misc_feature (6)..(6): 2'-deoxy-2'-fluoro
  misc_feature (10)..(10): 2'-deoxy-2'-fluoro
  misc_feature (12)..(12): 2'-deoxy-2'-fluoro
  misc_feature (15)..(15): 2'-deoxy-2'-fluoro
  misc_feature (18)..(19): 2'-deoxy-2'-fluoro
  misc_feature (20)..(20): Phosphorothioate 3'-Internucleotide Linkage
  misc_feature (1)..(19): RNA
gucagugggcauagugguctt

SEQ ID NO: 1338 - DNA, 21 bp, Artificial Sequence
  Synthetic
  misc_feature (2)..(2): 2'-deoxy-2'-fluoro
  misc_feature (8)..(8): 2'-deoxy-2'-fluoro
  misc_feature (10)..(11): 2'-deoxy-2'-fluoro
  misc_feature (19)..(19): 2'-deoxy-2'-fluoro
  misc_feature (20)..(20): Phosphorothioate 3'-Internucleotide Linkage
  misc_feature (1)..(19): RNA
guggaaacacugagggagutt

SEQ ID NO: 1339 - DNA, 21 bp, Artificial Sequence
  Synthetic
  misc_feature (3)..(3): 2'-deoxy-2'-fluoro
  misc_feature (6)..(6): 2'-deoxy-2'-fluoro
  misc_feature (8)..(8): 2'-deoxy-2'-fluoro
  misc_feature (13)..(13): 2'-deoxy-2'-fluoro
  misc_feature (18)..(19): 2'-deoxy-2'-fluoro
  misc_feature (20)..(20): Phosphorothioate 3'-Internucleotide Linkage
  misc_feature (1)..(19): RNA
aauaaugcagagugagguutt

SEQ ID NO: 1340 - DNA, 21 bp, Artificial Sequence
  Synthetic
  misc_feature (1)..(2): 2'-deoxy-2'-fluoro
  misc_feature (4)..(4): 2'-deoxy-2'-fluoro
  misc_feature (6)..(10): 2'-deoxy-2'-fluoro
  misc_feature (14)..(17): 2'-deoxy-2'-fluoro
  misc_feature (19)..(19): 2'-deoxy-2'-fluoro
  misc_feature (20)..(20): Phosphorothioate 3'-Internucleotide Linkage
  misc_feature (1)..(19): RNA
cugcacuucuggacuuuautt

SEQ ID NO: 1341 - DNA, 21 bp, Artificial Sequence
  Synthetic
  misc_feature (2)..(3): 2'-deoxy-2'-fluoro
  misc_feature (5)..(5): 2'-deoxy-2'-fluoro
  misc_feature (7)..(11): 2'-deoxy-2'-fluoro
  misc_feature (15)..(18): 2'-deoxy-2'-fluoro
  misc_feature (20)..(20): Phosphorothioate 3'-Internucleotide Linkage
  misc_feature (1)..(19): RNA
gcugcacuucuggacuuuatt

SEQ ID NO: 1342 - DNA, 21 bp, Artificial Sequence
  Synthetic
  misc_feature (3)..(4): 2'-deoxy-2'-fluoro
  misc_feature (7)..(7): 2'-deoxy-2'-fluoro
  misc_feature (10)..(11): 2'-deoxy-2'-fluoro
  misc_feature (17)..(17): 2'-deoxy-2'-fluoro
  misc_feature (20)..(20): Phosphorothioate 3'-Internucleotide Linkage
  misc_feature (1)..(19): RNA
aacugacagccagaagugatt

SEQ ID NO: 1343 - DNA, 21 bp, Artificial Sequence
  Synthetic
  misc_feature (1)..(1): 5'-3 attached terminal deoxyabasic moeity
  misc_feature (1)..(1): 2'-deoxy
  misc_feature (2)..(3): 2'-deoxy-2'-fluoro
  misc_feature (4)..(4): 2'-deoxy
  misc_feature (5)..(5): 2'-deoxy-2'-fluoro
  misc_feature (6)..(7): 2'-deoxy
  misc_feature (8)..(9): 2'-deoxy-2'-fluoro
  misc_feature (10)..(11): 2'-deoxy
  misc_feature (12)..(19): 2'-deoxy-2'-fluoro
  misc_feature (1)..(19): RNA
  misc_feature (21)..(21): 3'-3 attached terminal deoxyabasic moeity
accacagcugauuucuucctt

SEQ ID NO: 1344 - DNA, 21 bp, Artificial Sequence
  Synthetic
  misc_feature (1)..(1): 5'-3 attached terminal deoxyabasic moeity
  misc_feature (1)..(8): 2'-deoxy-2'-fluoro
  misc_feature (9)..(10): 2'-deoxy
  misc_feature (11)..(12): 2'-deoxy-2'-fluoro
  misc_feature (13)..(13): 2'-deoxy
  misc_feature (14)..(15): 2'-deoxy-2'-fluoro
  misc_feature (16)..(16): 2'-deoxy
  misc_feature (17)..(17): 2'-deoxy-2'-fluoro
  misc_feature (18)..(18): 2'-deoxy
  misc_feature (19)..(19): 2'-deoxy-2'-fluoro
  misc_feature (1)..(19): RNA
  misc_feature (21)..(21): 3'-3 attached terminal deoxyabasic moeity
uucuuccugaccacuaugctt

SEQ ID NO: 1345 - DNA, 21 bp, Artificial Sequence
  Synthetic
  misc_feature (1)..(1): 5'-3 attached terminal deoxyabasic moeity
  misc_feature (1)..(2): 2'-deoxy
  misc_feature (3)..(4): 2'-deoxy-2'-fluoro
  misc_feature (5)..(5): 2'-deoxy
  misc_feature (6)..(7): 2'-deoxy-2'-fluoro
  misc_feature (8)..(8): 2'-deoxy
  misc_feature (9)..(9): 2'-deoxy-2'-fluoro
  misc_feature (10)..(10): 2'-deoxy
  misc_feature (11)..(13): 2'-deoxy-2'-fluoro
  misc_feature (14)..(14): 2'-deoxy
  misc_feature (15)..(16): 2'-deoxy-2'-fluoro
  misc_feature (17)..(18): 2'-deoxy
  misc_feature (19)..(19): 2'-deoxy-2'-fluoro
  misc_feature (1)..(19): RNA
  misc_feature (21)..(21): 3'-3 attached terminal deoxyabasic moeity
gaccacuaugcccacugactt

SEQ ID NO: 1346 - DNA, 21 bp, Artificial Sequence
  Synthetic
  misc_feature (1)..(1): 5'-3 attached terminal deoxyabasic moeity
  misc_feature (1)..(1): 2'-deoxy
  misc_feature (2)..(8): 2'-deoxy-2'-fluoro
  misc_feature (9)..(10): 2'-deoxy
  misc_feature (11)..(11): 2'-deoxy-2'-fluoro
  misc_feature (12)..(12): 2'-deoxy
  misc_feature (13)..(17): 2'-deoxy-2'-fluoro
  misc_feature (18)..(18): 2'-deoxy
  misc_feature (19)..(19): 2'-deoxy-2'-fluoro
  misc_feature (1)..(19): RNA
  misc_feature (21)..(21): 3'-3 attached terminal deoxyabasic moeity
acucccucaguguuuccactt

SEQ ID NO: 1347 - DNA, 21 bp, Artificial Sequence
  Synthetic
  misc_feature (1)..(1): 5'-3 attached terminal deoxyabasic moeity
  misc_feature (1)..(2): 2'-deoxy
  misc_feature (3)..(6): 2'-deoxy-2'-fluoro
  misc_feature (7)..(7): 2'-deoxy
  misc_feature (8)..(11): 2'-deoxy-2'-fluoro
  misc_feature (12)..(12): 2'-deoxy
  misc_feature (13)..(13): 2'-deoxy-2'-fluoro
  misc_feature (14)..(14): 2'-deoxy
  misc_feature (15)..(16): 2'-deoxy-2'-fluoro
  misc_feature (17)..(17): 2'-deoxy
  misc_feature (18)..(19): 2'-deoxy-2'-fluoro
  misc_feature (1)..(19): RNA
  misc_feature (21)..(21): 3'-3 attached terminal deoxyabasic moeity
aaccucacucugcauuauutt

SEQ ID NO: 1348 - DNA, 21 bp, Artificial Sequence
  Synthetic
  misc_feature (1)..(1): 5'-3 attached terminal deoxyabasic moeity
  misc_feature (1)..(1): 2'-deoxy
  misc_feature (2)..(2): 2'-deoxy-2'-fluoro
  misc_feature (3)..(6): 2'-deoxy
  misc_feature (7)..(9): 2'-deoxy-2'-fluoro
  misc_feature (10)..(14): 2'-deoxy
  misc_feature (15)..(15): 2'-deoxy-2'-fluoro
  misc_feature (16)..(16): 2'-deoxy
  misc_feature (17)..(17): 2'-deoxy-2'-fluoro
  misc_feature (18)..(19): 2'-deoxy
  misc_feature (1)..(19): RNA
  misc_feature (21)..(21): 3'-3 attached terminal deoxyabasic moeity
auaaaguccagaagugcagtt

SEQ ID NO: 1349 - DNA, 21 bp, Artificial Sequence
  Synthetic
  misc_feature (1)..(1): 5'-3 attached terminal deoxyabasic moeity
  misc_feature (1)..(1): 2'-deoxy-2'-fluoro
  misc_feature (2)..(5): 2'-deoxy
  misc_feature (6)..(8): 2'-deoxy-2'-fluoro
  misc_feature (9)..(13): 2'-deoxy
  misc_feature (14)..(14): 2'-deoxy-2'-fluoro
  misc_feature (15)..(15): 2'-deoxy
  misc_feature (16)..(16): 2'-deoxy-2'-fluoro
  misc_feature (17)..(18): 2'-deoxy
  misc_feature (19)..(19): 2'-deoxy-2'-fluoro
  misc_feature (1)..(19): RNA
  misc_feature (21)..(21): 3'-3 attached terminal deoxyabasic moeity
uaaaguccagaagugcagctt

SEQ ID NO: 1350 - DNA, 21 bp, Artificial Sequence
  Synthetic
  misc_feature (1)..(1): 5'-3 attached terminal deoxyabasic moeity
  misc_feature (1)..(2): 2'-deoxy-2'-fluoro
  misc_feature (3)..(3): 2'-deoxy
  misc_feature (4)..(8): 2'-deoxy-2'-fluoro
  misc_feature (9)..(10): 2'-deoxy
  misc_feature (11)..(12): 2'-deoxy-2'-fluoro
  misc_feature (13)..(13): 2'-deoxy
  misc_feature (14)..(15): 2'-deoxy-2'-fluoro
  misc_feature (16)..(17): 2'-deoxy
  misc_feature (18)..(19): 2'-deoxy-2'-fluoro
  misc_feature (1)..(19): RNA
  misc_feature (21)..(21): 3'-3 attached terminal deoxyabasic moeity
ucacuucuggcugucaguutt

SEQ ID NO: 1351 - DNA, 21 bp, Artificial Sequence
  Synthetic
  misc_feature (1)..(8): 2'-deoxy
  misc_feature (9)..(10): 2'-deoxy-2'-fluoro
  misc_feature (11)..(12): 2'-deoxy
  misc_feature (13)..(14): 2'-deoxy-2'-fluoro
  misc_feature (15)..(15): 2'-deoxy
  misc_feature (16)..(16): 2'-deoxy-2'-fluoro
  misc_feature (17)..(18): 2'-deoxy
  misc_feature (19)..(19): 2'-deoxy-2'-fluoro
  misc_feature (20)..(20): Phosphorothioate 3'-Internucleotide Linkage
  misc_feature (1)..(19): RNA
ggaagaaaucagcuguggutt

SEQ ID NO: 1352 - DNA, 21 bp, Artificial Sequence
  Synthetic
  misc_feature (1)..(1): 2'-deoxy
  misc_feature (2)..(2): 2'-deoxy-2'-fluoro
  misc_feature (3)..(3): 2'-deoxy
  misc_feature (4)..(4): 2'-deoxy-2'-fluoro
  misc_feature (5)..(6): 2'-deoxy
  misc_feature (7)..(7): 2'-deoxy-2'-fluoro
  misc_feature (8)..(9): 2'-deoxy
  misc_feature (10)..(11): 2'-deoxy-2'-fluoro
  misc_feature (12)..(19): 2'-deoxy
  misc_feature (20)..(20): Phosphorothioate 3'-Internucleotide Linkage
  misc_feature (1)..(19): RNA
gcauaguggucaggaagaatt

SEQ ID NO: 1353 - DNA, 21 bp, Artificial Sequence
  Synthetic
  misc_feature (1)..(1): 2'-deoxy
  misc_feature (2)..(3): 2'-deoxy-2'-fluoro
  misc_feature (4)..(5): 2'-deoxy
  misc_feature (6)..(6): 2'-deoxy-2'-fluoro
  misc_feature (7)..(9): 2'-deoxy
  misc_feature (10)..(10): 2'-deoxy-2'-fluoro
  misc_feature (11)..(11): 2'-deoxy
  misc_feature (12)..(12): 2'-deoxy-2'-fluoro
  misc_feature (13)..(14): 2'-deoxy
  misc_feature (15)..(15): 2'-deoxy-2'-fluoro
  misc_feature (16)..(17): 2'-deoxy
  misc_feature (18)..(19): 2'-deoxy-2'-fluoro
  misc_feature (20)..(20): Phosphorothioate 3'-Internucleotide Linkage
  misc_feature (1)..(19): RNA
gucagugggcauagugguctt

SEQ ID NO: 1354 - DNA, 21 bp, Artificial Sequence
  Synthetic
  misc_feature (1)..(1): 2'-deoxy
  misc_feature (2)..(2): 2'-deoxy-2'-fluoro
  misc_feature (3)..(7): 2'-deoxy
  misc_feature (8)..(8): 2'-deoxy-2'-fluoro
  misc_feature (9)..(9): 2'-deoxy
  misc_feature (10)..(11): 2'-deoxy-2'-fluoro
  misc_feature (12)..(18): 2'-deoxy
  misc_feature (19)..(19): 2'-deoxy-2'-fluoro
  misc_feature (20)..(20): Phosphorothioate 3'-Internucleotide Linkage
  misc_feature (1)..(19): RNA
guggaaacacugagggagutt

SEQ ID NO: 1355 - DNA, 21 bp, Artificial Sequence
  Synthetic
  misc_feature (1)..(2): 2'-deoxy
  misc_feature (3)..(3): 2'-deoxy-2'-fluoro
  misc_feature (4)..(5): 2'-deoxy
  misc_feature (6)..(6): 2'-deoxy-2'-fluoro
  misc_feature (7)..(7): 2'-deoxy
  misc_feature (8)..(8): 2'-deoxy-2'-fluoro
  misc_feature (9)..(12): 2'-deoxy
  misc_feature (13)..(13): 2'-deoxy-2'-fluoro
  misc_feature (14)..(17): 2'-deoxy
  misc_feature (18)..(19): 2'-deoxy-2'-fluoro
  misc_feature (20)..(20): Phosphorothioate 3'-Internucleotide Linkage
  misc_feature (1)..(19): RNA
aauaaugcagagugagguutt

SEQ ID NO: 1356 - DNA, 21 bp, Artificial Sequence
  Synthetic
  misc_feature (1)..(2): 2'-deoxy-2'-fluoro
  misc_feature (3)..(3): 2'-deoxy
  misc_feature (4)..(4): 2'-deoxy-2'-fluoro
  misc_feature (5)..(5): 2'-deoxy
  misc_feature (6)..(10): 2'-deoxy-2'-fluoro
  misc_feature (11)..(13): 2'-deoxy
  misc_feature (14)..(17): 2'-deoxy-2'-fluoro
  misc_feature (18)..(18): 2'-deoxy
  misc_feature (19)..(19): 2'-deoxy-2'-fluoro
  misc_feature (20)..(20): Phosphorothioate 3'-Internucleotide Linkage
  misc_feature (1)..(19): RNA
cugcacuucuggacuuuautt

SEQ ID NO: 1357 - DNA, 21 bp, Artificial Sequence
  Synthetic
  misc_feature (1)..(1): 2'-deoxy
  misc_feature (2)..(3): 2'-deoxy-2'-fluoro
  misc_feature (4)..(4): 2'-deoxy
  misc_feature (5)..(5): 2'-deoxy-2'-fluoro
  misc_feature (6)..(6): 2'-deoxy
  misc_feature (7)..(11): 2'-deoxy-2'-fluoro
  misc_feature (12)..(14): 2'-deoxy
  misc_feature (15)..(18): 2'-deoxy-2'-fluoro
  misc_feature (19)..(19): 2'-deoxy
  misc_feature (20)..(20): Phosphorothioate 3'-Internucleotide Linkage
  misc_feature (1)..(19): RNA
gcugcacuucuggacuuuatt

SEQ ID NO: 1358 - DNA, 21 bp, Artificial Sequence
  Synthetic
  misc_feature (1)..(2): 2'-deoxy
  misc_feature (3)..(4): 2'-deoxy-2'-fluoro
  misc_feature (5)..(6): 2'-deoxy
  misc_feature (7)..(7): 2'-deoxy-2'-fluoro
  misc_feature (8)..(9): 2'-deoxy
  misc_feature (10)..(11): 2'-deoxy-2'-fluoro
  misc_feature (12)..(16): 2'-deoxy
  misc_feature (17)..(17): 2'-deoxy-2'-fluoro
  misc_feature (18)..(19): 2'-deoxy
  misc_feature (20)..(20): Phosphorothioate 3'-Internucleotide Linkage
  misc_feature (1)..(19): RNA
aacugacagccagaagugatt

SEQ ID NO: 1359 - DNA, 21 bp, Artificial Sequence
  Synthetic
  misc_feature (1)..(1): 5'-3 attached terminal deoxyabasic moeity
  misc_feature (1)..(1): 2'-O-methyl
  misc_feature (2)..(3): 2'-deoxy-2'-fluoro
  misc_feature (4)..(4): 2'-O-methyl
  misc_feature (5)..(5): 2'-deoxy-2'-fluoro
  misc_feature (6)..(7): 2'-O-methyl
  misc_feature (8)..(9): 2'-deoxy-2'-fluoro
  misc_feature (10)..(11): 2'-O-methyl
  misc_feature (12)..(19): 2'-deoxy-2'-fluoro
  misc_feature (1)..(19): RNA
  misc_feature (21)..(21): 3'-3 attached terminal deoxyabasic moeity
accacagcugauuucuucctt

SEQ ID NO: 1360 - DNA, 21 bp, Artificial Sequence
  Synthetic
  misc_feature (1)..(1): 5'-3 attached terminal deoxyabasic moeity
  misc_feature (1)..(8): 2'-deoxy-2'-fluoro
  misc_feature (9)..(10): 2'-O-methyl
  misc_feature (11)..(12): 2'-deoxy-2'-fluoro
  misc_feature (13)..(13): 2'-O-methyl
  misc_feature (14)..(15): 2'-deoxy-2'-fluoro
  misc_feature (16)..(16): 2'-O-methyl
  misc_feature (17)..(17): 2'-deoxy-2'-fluoro
  misc_feature (18)..(18): 2'-O-methyl
  misc_feature (19)..(19): 2'-deoxy-2'-fluoro
  misc_feature (1)..(19): RNA
  misc_feature (21)..(21): 3'-3 attached terminal deoxyabasic moeity
uucuuccugaccacuaugctt

SEQ ID NO: 1361 - DNA, 21 bp, Artificial Sequence
  Synthetic
  misc_feature (1)..(1): 5'-3 attached terminal deoxyabasic moeity
  misc_feature (1)..(2): 2'-O-methyl
  misc_feature (3)..(4): 2'-deoxy-2'-fluoro
  misc_feature (5)..(5): 2'-O-methyl
  misc_feature (6)..(7): 2'-deoxy-2'-fluoro
  misc_feature (8)..(8): 2'-O-methyl
  misc_feature (9)..(9): 2'-deoxy-2'-fluoro
  misc_feature (10)..(10): 2'-O-methyl
  misc_feature (11)..(13): 2'-deoxy-2'-fluoro
  misc_feature (14)..(14): 2'-O-methyl
  misc_feature (15)..(16): 2'-deoxy-2'-fluoro
  misc_feature (17)..(18): 2'-O-methyl
  misc_feature (19)..(19): 2'-deoxy-2'-fluoro
  misc_feature (1)..(19): RNA
  misc_feature (21)..(21): 3'-3 attached terminal deoxyabasic moeity
gaccacuaugcccacugactt

SEQ ID NO: 1362 - DNA, 21 bp, Artificial Sequence
  Synthetic
  misc_feature (1)..(1): 5'-3 attached terminal deoxyabasic moeity
  misc_feature (1)..(1): 2'-O-methyl
  misc_feature (2)..(8): 2'-deoxy-2'-fluoro
  misc_feature (9)..(10): 2'-O-methyl
  misc_feature (11)..(11): 2'-deoxy-2'-fluoro
  misc_feature (12)..(12): 2'-O-methyl
  misc_feature (13)..(17): 2'-deoxy-2'-fluoro
  misc_feature (18)..(18): 2'-O-methyl
  misc_feature (19)..(19): 2'-deoxy-2'-fluoro
  misc_feature (1)..(19): RNA
  misc_feature (21)..(21): 3'-3 attached terminal deoxyabasic moeity
acucccucaguguuuccactt

SEQ ID NO: 1363 - DNA, 21 bp, Artificial Sequence
  Synthetic
  misc_feature (1)..(1): 5'-3 attached terminal deoxyabasic moeity
  misc_feature (1)..(2): 2'-O-methyl
  misc_feature (3)..(6): 2'-deoxy-2'-fluoro
  misc_feature (7)..(7): 2'-O-methyl
  misc_feature (8)..(11): 2'-deoxy-2'-fluoro
  misc_feature (12)..(12): 2'-O-methyl
  misc_feature (13)..(13): 2'-deoxy-2'-fluoro
  misc_feature (14)..(14): 2'-O-methyl
  misc_feature (15)..(16): 2'-deoxy-2'-fluoro
  misc_feature (17)..(17): 2'-O-methyl
  misc_feature (18)..(19): 2'-deoxy-2'-fluoro
  misc_feature (1)..(19): RNA
  misc_feature (21)..(21): 3'-3 attached terminal deoxyabasic moeity
aaccucacucugcauuauutt

SEQ ID NO: 1364 - DNA, 21 bp, Artificial Sequence
  Synthetic
  misc_feature (1)..(1): 5'-3 attached terminal deoxyabasic moeity
  misc_feature (1)..(1): 2'-O-methyl
  misc_feature (2)..(2): 2'-deoxy-2'-fluoro
  misc_feature (3)..(6): 2'-O-methyl
  misc_feature (7)..(9): 2'-deoxy-2'-fluoro
  misc_feature (10)..(14): 2'-O-methyl
  misc_feature (15)..(15): 2'-deoxy-2'-fluoro
  misc_feature (16)..(16): 2'-O-methyl
  misc_feature (17)..(17): 2'-deoxy-2'-fluoro
  misc_feature (18)..(19): 2'-O-methyl
  misc_feature (1)..(19): RNA
  misc_feature (21)..(21): 3'-3 attached terminal deoxyabasic moeity
auaaaguccagaagugcagtt

SEQ ID NO: 1365 - DNA, 21 bp, Artificial Sequence
  Synthetic
  misc_feature (1)..(1): 2'-deoxy-2'-fluoro
  misc_feature (1)..(1): 5'-3 attached terminal deoxyabasic moeity
  misc_feature (2)..(5): 2'-O-methyl
  misc_feature (6)..(8): 2'-deoxy-2'-fluoro
  misc_feature (9)..(13): 2'-O-methyl
  misc_feature (14)..(14): 2'-deoxy-2'-fluoro
  misc_feature (15)..(15): 2'-O-methyl
  misc_feature (16)..(16): 2'-deoxy-2'-fluoro
  misc_feature (17)..(18): 2'-O-methyl
  misc_feature (19)..(19): 2'-deoxy-2'-fluoro
  misc_feature (1)..(19): RNA
  misc_feature (21)..(21): 3'-3 attached terminal deoxyabasic moeity
uaaaguccagaagugcagctt

SEQ ID NO: 1366 - DNA, 21 bp, Artificial Sequence
  Synthetic
  misc_feature (1)..(1): 5'-3 attached terminal deoxyabasic moeity
  misc_feature (1)..(2): 2'-deoxy-2'-fluoro
  misc_feature (3)..(3): 2'-O-methyl
  misc_feature (4)..(8): 2'-deoxy-2'-fluoro
  misc_feature (9)..(10): 2'-O-methyl
  misc_feature (11)..(12): 2'-deoxy-2'-fluoro
  misc_feature (13)..(13): 2'-O-methyl
  misc_feature (14)..(15): 2'-deoxy-2'-fluoro
  misc_feature (16)..(17): 2'-O-methyl
  misc_feature (18)..(19): 2'-deoxy-2'-fluoro
  misc_feature (1)..(19): RNA
  misc_feature (21)..(21): 3'-3 attached terminal deoxyabasic moeity
ucacuucuggcugucaguutt

SEQ ID NO: 1367 - DNA, 21 bp, Artificial Sequence
  Synthetic
  misc_feature (1)..(8): 2'-O-methyl
  misc_feature (9)..(10): 2'-deoxy-2'-fluoro
  misc_feature (11)..(12): 2'-O-methyl
  misc_feature (13)..(14): 2'-deoxy-2'-fluoro
  misc_feature (15)..(15): 2'-O-methyl
  misc_feature (16)..(16): 2'-deoxy-2'-fluoro
  misc_feature (17)..(18): 2'-O-methyl
  misc_feature (19)..(19): 2'-deoxy-2'-fluoro
  misc_feature (20)..(20): Phosphorothioate 3'-Internucleotide Linkage
  misc_feature (1)..(19): RNA
ggaagaaaucagcuguggutt

SEQ ID NO: 1368 - DNA, 21 bp, Artificial Sequence
  Synthetic
  misc_feature (1)..(1): 2'-O-methyl
  misc_feature (2)..(2): 2'-deoxy-2'-fluoro
  misc_feature (3)..(3): 2'-O-methyl
  misc_feature (4)..(4): 2'-deoxy-2'-fluoro
  misc_feature (5)..(6): 2'-O-methyl
  misc_feature (7)..(7): 2'-deoxy-2'-fluoro
  misc_feature (8)..(9): 2'-O-methyl
  misc_feature (10)..(11): 2'-deoxy-2'-fluoro
  misc_feature (12)..(19): 2'-O-methyl
  misc_feature (20)..(20): Phosphorothioate 3'-Internucleotide Linkage
  misc_feature (1)..(19): RNA
gcauaguggucaggaagaatt

SEQ ID NO: 1369 - DNA, 21 bp, Artificial Sequence
  Synthetic
  misc_feature (1)..(1): 2'-O-methyl
  misc_feature (2)..(3): 2'-deoxy-2'-fluoro
  misc_feature (4)..(5): 2'-O-methyl
  misc_feature (6)..(6): 2'-deoxy-2'-fluoro
  misc_feature (7)..(9): 2'-O-methyl
  misc_feature (10)..(10): 2'-deoxy-2'-fluoro
  misc_feature (11)..(11): 2'-O-methyl
  misc_feature (12)..(12): 2'-deoxy-2'-fluoro
  misc_feature (13)..(14): 2'-O-methyl
  misc_feature (15)..(15): 2'-deoxy-2'-fluoro
  misc_feature (16)..(17): 2'-O-methyl
  misc_feature (18)..(19): 2'-deoxy-2'-fluoro
  misc_feature (20)..(20): Phosphorothioate 3'-Internucleotide Linkage
  misc_feature (1)..(19): RNA
gucagugggcauagugguctt

SEQ ID NO: 1370 - DNA, 21 bp, Artificial Sequence
  Synthetic
  misc_feature (1)..(1): 2'-O-methyl
  misc_feature (2)..(2): 2'-deoxy-2'-fluoro
  misc_feature (3)..(7): 2'-O-methyl
  misc_feature (8)..(8): 2'-deoxy-2'-fluoro
  misc_feature (9)..(9): 2'-O-methyl
  misc_feature (10)..(11): 2'-deoxy-2'-fluoro
  misc_feature (12)..(18): 2'-O-methyl
  misc_feature (19)..(19): 2'-deoxy-2'-fluoro
  misc_feature (20)..(20): Phosphorothioate 3'-Internucleotide Linkage
  misc_feature (1)..(19): RNA
guggaaacacugagggagutt

SEQ ID NO: 1371 - DNA, 21 bp, Artificial Sequence
  Synthetic
  misc_feature (1)..(2): 2'-O-methyl
  misc_feature (3)..(3): 2'-deoxy-2'-fluoro
  misc_feature (4)..(5): 2'-O-methyl
  misc_feature (6)..(6): 2'-deoxy-2'-fluoro
  misc_feature (7)..(7): 2'-O-methyl
  misc_feature (8)..(8): 2'-deoxy-2'-fluoro
  misc_feature (9)..(12): 2'-O-methyl
  misc_feature (13)..(13): 2'-deoxy-2'-fluoro
  misc_feature (14)..(17): 2'-O-methyl
  misc_feature (18)..(19): 2'-deoxy-2'-fluoro
  misc_feature (20)..(20): Phosphorothioate 3'-Internucleotide Linkage
  misc_feature (1)..(19): RNA
aauaaugcagagugagguutt

SEQ ID NO: 1372 - DNA, 21 bp, Artificial Sequence
  Synthetic
  misc_feature (1)..(2): 2'-deoxy-2'-fluoro
  misc_feature (3)..(3): 2'-O-methyl
  misc_feature (4)..(4): 2'-deoxy-2'-fluoro
  misc_feature (5)..(5): 2'-O-methyl
  misc_feature (6)..(10): 2'-deoxy-2'-fluoro
  misc_feature (11)..(13): 2'-O-methyl
  misc_feature (14)..(17): 2'-deoxy-2'-fluoro
  misc_feature (18)..(18): 2'-O-methyl
  misc_feature (19)..(19): 2'-deoxy-2'-fluoro
  misc_feature (20)..(20): Phosphorothioate 3'-Internucleotide Linkage
  misc_feature (1)..(19): RNA
cugcacuucuggacuuuautt

SEQ ID NO: 1373 - DNA, 21 bp, Artificial Sequence
  Synthetic
  misc_feature (1)..(1): 2'-O-methyl
  misc_feature (2)..(3): 2'-deoxy-2'-fluoro
  misc_feature (4)..(4): 2'-O-methyl
  misc_feature (5)..(5): 2'-deoxy-2'-fluoro
  misc_feature (6)..(6): 2'-O-methyl
  misc_feature (7)..(11): 2'-deoxy-2'-fluoro
  misc_feature (12)..(14): 2'-O-methyl
  misc_feature (15)..(18): 2'-deoxy-2'-fluoro
  misc_feature (19)..(19): 2'-O-methyl
  misc_feature (20)..(20): Phosphorothioate 3'-Internucleotide Linkage
  misc_feature (1)..(19): RNA
gcugcacuucuggacuuuatt

SEQ ID NO: 1374 - DNA, 21 bp, Artificial Sequence
  Synthetic
  misc_feature (1)..(2): 2'-O-methyl
  misc_feature (3)..(4): 2'-deoxy-2'-fluoro
  misc_feature (5)..(6): 2'-O-methyl
  misc_feature (7)..(7): 2'-deoxy-2'-fluoro
  misc_feature (8)..(9): 2'-O-methyl
  misc_feature (10)..(11): 2'-deoxy-2'-fluoro
  misc_feature (12)..(16): 2'-O-methyl
  misc_feature (17)..(17): 2'-deoxy-2'-fluoro
  misc_feature (18)..(19): 2'-O-methyl
  misc_feature (20)..(20): Phosphorothioate 3'-Internucleotide Linkage
  misc_feature (1)..(19): RNA
aacugacagccagaagugatt

SEQ ID NO: 1375 - DNA, 21 bp, Artificial Sequence
  Synthetic
  misc_feature (1)..(1): 5'-3 attached terminal deoxyabasic moeity
  misc_feature (1)..(19): RNA
  misc_feature (21)..(21): 3'-3 attached terminal deoxyabasic moeity
accacagcugauuucuucctt

SEQ ID NO: 1376 - DNA, 21 bp, Artificial Sequence
  Synthetic
  misc_feature (1)..(1): 5'-3 attached terminal deoxyabasic moeity
  misc_feature (1)..(19): RNA
  misc_feature (21)..(21): 3'-3 attached terminal deoxyabasic moeity
uucuuccugaccacuaugctt

SEQ ID NO: 1377 - DNA, 21 bp, Artificial Sequence
  Synthetic
  misc_feature (1)..(1): 5'-3 attached terminal deoxyabasic moeity
  misc_feature (1)..(19): RNA
  misc_feature (21)..(21): 3'-3 attached terminal deoxyabasic moeity
gaccacuaugcccacugactt

SEQ ID NO: 1378 - DNA, 21 bp, Artificial Sequence
  Synthetic
  misc_feature (1)..(1): 5'-3 attached terminal deoxyabasic moeity
  misc_feature (1)..(19): RNA
  misc_feature (21)..(21): 3'-3 attached terminal deoxyabasic moeity
acucccucaguguuuccactt

SEQ ID NO: 1379 - DNA, 21 bp, Artificial Sequence
  Synthetic
  misc_feature (1)..(1): 5'-3 attached terminal deoxyabasic moeity
  misc_feature (1)..(19): RNA
  misc_feature (21)..(21): 3'-3 attached terminal deoxyabasic moeity
aaccucacucugcauuauutt

SEQ ID NO: 1380 - DNA, 21 bp, Artificial Sequence
  Synthetic
  misc_feature (1)..(1): 5'-3 attached terminal deoxyabasic moeity
  misc_feature (1)..(19): RNA
  misc_feature (21)..(21): 3'-3 attached terminal deoxyabasic moeity
auaaaguccagaagugcagtt

SEQ ID NO: 1381 - DNA, 21 bp, Artificial Sequence
  Synthetic
  misc_feature (1)..(1): 5'-3 attached terminal deoxyabasic moeity
  misc_feature (1)..(19): RNA
  misc_feature (21)..(21): 3'-3 attached terminal deoxyabasic moeity
uaaaguccagaagugcagctt

SEQ ID NO: 1382 - DNA, 21 bp, Artificial Sequence
  Synthetic
  misc_feature (1)..(1): 5'-3 attached terminal deoxyabasic moeity
  misc_feature (1)..(19): RNA
  misc_feature (21)..(21): 3'-3 attached terminal deoxyabasic moeity
ucacuucuggcugucaguutt

SEQ ID NO: 1383 - DNA, 21 bp, Artificial Sequence
  Synthetic
  misc_feature (20)..(20): Phosphorothioate 3'-Internucleotide Linkage
  misc_feature (1)..(19): RNA
ggaagaaaucagcuguggutt

SEQ ID NO: 1384 - DNA, 21 bp, Artificial Sequence
  Synthetic
  misc_feature (20)..(20): Phosphorothioate 3'-Internucleotide Linkage
  misc_feature (1)..(19): RNA
gcauaguggucaggaagaatt

SEQ ID NO: 1385 - DNA, 21 bp, Artificial Sequence
  Synthetic
  misc_feature (20)..(20): Phosphorothioate 3'-Internucleotide Linkage
  misc_feature (1)..(19): RNA
gucagugggcauagugguctt

SEQ ID NO: 1386 - DNA, 21 bp, Artificial Sequence
  Synthetic
  misc_feature (20)..(20): Phosphorothioate 3'-Internucleotide Linkage
  misc_feature (1)..(19): RNA
guggaaacacugagggagutt

SEQ ID NO: 1387 - DNA, 21 bp, Artificial Sequence
  Synthetic
  misc_feature (20)..(20): Phosphorothioate 3'-Internucleotide Linkage
  misc_feature (1)..(19): RNA
aauaaugcagagugagguutt

SEQ ID NO: 1388 - DNA, 21 bp, Artificial Sequence
  Synthetic
  misc_feature (20)..(20): Phosphorothioate 3'-Internucleotide Linkage
  misc_feature (1)..(19): RNA
cugcacuucuggacuuuautt

SEQ ID NO: 1389 - DNA, 21 bp, Artificial Sequence
  Synthetic
  misc_feature (20)..(20): Phosphorothioate 3'-Internucleotide Linkage
  misc_feature (1)..(19): RNA
gcugcacuucuggacuuuatt

SEQ ID NO: 1390 - DNA, 21 bp, Artificial Sequence
  Synthetic
  misc_feature (20)..(20): Phosphorothioate 3'-Internucleotide Linkage
  misc_feature (1)..(19): RNA
aacugacagccagaagugatt

SEQ ID NO: 1391 - DNA, 21 bp, Artificial Sequence
  Synthetic
  misc_feature (1)..(1): 5'-3 attached terminal deoxyabasic moeity
  misc_feature (9)..(10): 2'-deoxy-2'-fluoro
  misc_feature (13)..(14): 2'-deoxy-2'-fluoro
  misc_feature (16)..(16): 2'-deoxy-2'-fluoro
  misc_feature (19)..(19): 2'-deoxy-2'-fluoro
  misc_feature (1)..(19): RNA
  misc_feature (21)..(21): 3'-3 attached terminal deoxyabasic moeity
ggaagaaaucagcuguggutt

SEQ ID NO: 1392 - DNA, 21 bp, Artificial Sequence
  Synthetic
  misc_feature (1)..(1): 5'-3 attached terminal deoxyabasic moeity
  misc_feature (2)..(2): 2'-deoxy-2'-fluoro
  misc_feature (4)..(4): 2'-deoxy-2'-fluoro
  misc_feature (7)..(7): 2'-deoxy-2'-fluoro
  misc_feature (10)..(11): 2'-deoxy-2'-fluoro
  misc_feature (1)..(19): RNA
  misc_feature (21)..(21): 3'-3 attached terminal deoxyabasic moeity
gcauaguggucaggaagaatt

SEQ ID NO: 1393 - DNA, 21 bp, Artificial Sequence
  Synthetic
  misc_feature (1)..(1): 5'-3 attached terminal deoxyabasic moeity
  misc_feature (2)..(3): 2'-deoxy-2'-fluoro
  misc_feature (6)..(6): 2'-deoxy-2'-fluoro
  misc_feature (10)..(10): 2'-deoxy-2'-fluoro
  misc_feature (12)..(12): 2'-deoxy-2'-fluoro
  misc_feature (15)..(15): 2'-deoxy-2'-fluoro
  misc_feature (18)..(19): 2'-deoxy-2'-fluoro
  misc_feature (1)..(19): RNA
  misc_feature (21)..(21): 3'-3 attached terminal deoxyabasic moeity
gucagugggcauagugguctt

SEQ ID NO: 1394 - DNA, 21 bp, Artificial Sequence
  Synthetic
  misc_feature (1)..(1): 5'-3 attached terminal deoxyabasic moeity
  misc_feature (2)..(2): 2'-deoxy-2'-fluoro
  misc_feature (8)..(8): 2'-deoxy-2'-fluoro
  misc_feature (10)..(11): 2'-deoxy-2'-fluoro
  misc_feature (19)..(19): 2'-deoxy-2'-fluoro
  misc_feature (1)..(19): RNA
  misc_feature (21)..(21): 3'-3 attached terminal deoxyabasic moeity
guggaaacacugagggagutt

SEQ ID NO: 1395 - DNA, 21 bp, Artificial Sequence
  Synthetic
  misc_feature (1)..(1): 5'-3 attached terminal deoxyabasic moeity
  misc_feature (3)..(3): 2'-deoxy-2'-fluoro
  misc_feature (6)..(6): 2'-deoxy-2'-fluoro
  misc_feature (8)..(8): 2'-deoxy-2'-fluoro
  misc_feature (13)..(13): 2'-deoxy-2'-fluoro
  misc_feature (18)..(19): 2'-deoxy-2'-fluoro
  misc_feature (1)..(19): RNA
  misc_feature (21)..(21): 3'-3 attached terminal deoxyabasic moeity
aauaaugcagagugagguutt

SEQ ID NO: 1396 - DNA, 21 bp, Artificial Sequence
  Synthetic
  misc_feature (1)..(1): 5'-3 attached terminal deoxyabasic moeity
  misc_feature (1)..(2): 2'-deoxy-2'-fluoro
  misc_feature (4)..(4): 2'-deoxy-2'-fluoro
  misc_feature (6)..(10): 2'-deoxy-2'-fluoro
  misc_feature (14)..(17): 2'-deoxy-2'-fluoro
  misc_feature (19)..(19): 2'-deoxy-2'-fluoro
  misc_feature (1)..(19): RNA
  misc_feature (21)..(21): 3'-3 attached terminal deoxyabasic moeity
cugcacuucuggacuuuautt

SEQ ID NO: 1397 - DNA, 21 bp, Artificial Sequence
  Synthetic
  misc_feature (1)..(1): 5'-3 attached terminal deoxyabasic moeity
  misc_feature (2)..(3): 2'-deoxy-2'-fluoro
  misc_feature (5)..(5): 2'-deoxy-2'-fluoro
  misc_feature (7)..(11): 2'-deoxy-2'-fluoro
  misc_feature (15)..(18): 2'-deoxy-2'-fluoro
  misc_feature (1)..(19): RNA
  misc_feature (21)..(21): 3'-3 attached terminal deoxyabasic moeity
gcugcacuucuggacuuuatt

SEQ ID NO: 1398 - DNA, 21 bp, Artificial Sequence
  Synthetic
  misc_feature (1)..(1): 5'-3 attached terminal deoxyabasic moeity
  misc_feature (3)..(4): 2'-deoxy-2'-fluoro
  misc_feature (7)..(7): 2'-deoxy-2'-fluoro
  misc_feature (10)..(11): 2'-deoxy-2'-fluoro
  misc_feature (17)..(17): 2'-deoxy-2'-fluoro
  misc_feature (1)..(19): RNA
  misc_feature (21)..(21): 3'-3 attached terminal deoxyabasic moeity
aacugacagccagaagugatt

SEQ ID NO: 1399 - DNA, 21 bp, Artificial Sequence
  Synthetic
  misc_feature (1)..(1): 5'-3 attached terminal deoxyabasic moeity
  misc_feature (1)..(19): RNA
  misc_feature (21)..(21): 3'-3 attached terminal deoxyabasic moeity
ggaagaaaucagcuguggutt

SEQ ID NO: 1400 - DNA, 21 bp, Artificial Sequence
  Synthetic
  misc_feature (1)..(1): 5'-3 attached terminal deoxyabasic moeity
  misc_feature (1)..(19): RNA
  misc_feature (21)..(21): 3'-3 attached terminal deoxyabasic moeity
gcauaguggucaggaagaatt

SEQ ID NO: 1401 - DNA, 21 bp, Artificial Sequence
  Synthetic
  misc_feature (1)..(1): 5'-3 attached terminal deoxyabasic moeity
  misc_feature (1)..(19): RNA
  misc_feature (21)..(21): 3'-3 attached terminal deoxyabasic moeity
gucagugggcauagugguctt

SEQ ID NO: 1402 - DNA, 21 bp, Artificial Sequence
  Synthetic
  misc_feature (1)..(1): 5'-3 attached terminal deoxyabasic moeity
  misc_feature (1)..(19): RNA
  misc_feature (21)..(21): 3'-3 attached terminal deoxyabasic moeity
guggaaacacugagggagutt

SEQ ID NO: 1403 - DNA, 21 bp, Artificial Sequence
  Synthetic
  misc_feature (1)..(1): 5'-3 attached terminal deoxyabasic moeity
  misc_feature (1)..(19): RNA
  misc_feature (21)..(21): 3'-3 attached terminal deoxyabasic moeity
aauaaugcagagugagguutt

SEQ ID NO: 1404 - DNA, 21 bp, Artificial Sequence
  Synthetic
  misc_feature (1)..(1): 5'-3 attached terminal deoxyabasic moeity
  misc_feature (1)..(19): RNA
  misc_feature (21)..(21): 3'-3 attached terminal deoxyabasic moeity
cugcacuucuggacuuuautt

SEQ ID NO: 1405 - DNA, 21 bp, Artificial Sequence
  Synthetic
  misc_feature (1)..(1): 5'-3 attached terminal deoxyabasic moeity
  misc_feature (1)..(19): RNA
  misc_feature (21)..(21): 3'-3 attached terminal deoxyabasic moeity
gcugcacuucuggacuuuatt

SEQ ID NO: 1406 - DNA, 21 bp, Artificial Sequence
  Synthetic
  misc_feature (1)..(1): 5'-3 attached terminal deoxyabasic moeity
  misc_feature (1)..(19): RNA
  misc_feature (21)..(21): 3'-3 attached terminal deoxyabasic moeity
aacugacagccagaagugatt

SEQ ID NO: 1407 - DNA, 21 bp, Artificial Sequence
  Synthetic
  misc_feature (1)..(19): RNA
gccucacagagcagaagactt

SEQ ID NO: 1408 - DNA, 21 bp, Artificial Sequence
  Synthetic
  misc_feature (1)..(19): RNA
cucacagagcagaagacuctt

SEQ ID NO: 1409 - DNA, 21 bp, Artificial Sequence
  Synthetic
  misc_feature (1)..(19): RNA
gaguugaccguaacagacatt

SEQ ID NO: 1410 - DNA, 21 bp, Artificial Sequence
  Synthetic
  misc_feature (1)..(19): RNA
uaacagacaucuuugcugctt

SEQ ID NO: 1411 - DNA, 21 bp, Artificial Sequence
  Synthetic
  misc_feature (1)..(19): RNA
cuccaagaacacaacugagtt

SEQ ID NO: 1412 - DNA, 21 bp, Artificial Sequence
  Synthetic
  misc_feature (1)..(19): RNA
uacagccaccaugagaaggtt

SEQ ID NO: 1413 - DNA, 21 bp, Artificial Sequence
  Synthetic
  misc_feature (1)..(19): RNA
gaauuccuguccugugaagtt

SEQ ID NO: 1414 - DNA, 21 bp, Artificial Sequence
  Synthetic
  misc_feature (1)..(19): RNA
aggaagccaaccagaguactt

SEQ ID NO: 1415 - DNA, 21 bp, Artificial Sequence
  Synthetic
  misc_feature (1)..(19): RNA
gucuucugcucugugaggctt

SEQ ID NO: 1416 - DNA, 21 bp, Artificial Sequence
  Synthetic
  misc_feature (1)..(19): RNA
gagucuucugcucugugagtt

SEQ ID NO: 1417 - DNA, 21 bp, Artificial Sequence
  Synthetic
  misc_feature (1)..(19): RNA
ugucuguuacggucaacuctt

SEQ ID NO: 1418 - DNA, 21 bp, Artificial Sequence
  Synthetic
  misc_feature (1)..(19): RNA
gcagcaaagaugucuguuatt

SEQ ID NO: 1419 - DNA, 21 bp, Artificial Sequence
  Synthetic
  misc_feature (1)..(19): RNA
cucaguuguguucuuggagtt

SEQ ID NO: 1420 - DNA, 21 bp, Artificial Sequence
  Synthetic
  misc_feature (1)..(19): RNA
ccuucucaugguggcuguatt

SEQ ID NO: 1421 - DNA, 21 bp, Artificial Sequence
  Synthetic
  misc_feature (1)..(19): RNA
cuucacaggacaggaauuctt

SEQ ID NO: 1422 - DNA, 21 bp, Artificial Sequence
  Synthetic
  misc_feature (1)..(19): RNA
guacucugguuggcuuccutt

SEQ ID NO: 1423 - DNA, 21 bp, Artificial Sequence
  Synthetic
  misc_feature (1)..(1): 5'-3 attached terminal deoxyabasic moeity
  misc_feature (2)..(5): 2'-deoxy-2'-fluoro
  misc_feature (7)..(7): 2'-deoxy-2'-fluoro
  misc_feature (12)..(12): 2'-deoxy-2'-fluoro
  misc_feature (19)..(19): 2'-deoxy-2'-fluoro
  misc_feature (1)..(19): RNA
  misc_feature (21)..(21): 3'-3 attached terminal deoxyabasic moeity
gccucacagagcagaagactt

SEQ ID NO: 1424 - DNA, 21 bp, Artificial Sequence
  Synthetic
  misc_feature (1)..(1): 5'-3 attached terminal deoxyabasic moeity
  misc_feature (1)..(3): 2'-deoxy-2'-fluoro
  misc_feature (5)..(5): 2'-deoxy-2'-fluoro
  misc_feature (10)..(10): 2'-deoxy-2'-fluoro
  misc_feature (17)..(19): 2'-deoxy-2'-fluoro
  misc_feature (1)..(19): RNA
  misc_feature (21)..(21): 3'-3 attached terminal deoxyabasic moeity
cucacagagcagaagacuctt

SEQ ID NO: 1425 - DNA, 21 bp, Artificial Sequence
  Synthetic
  misc_feature (1)..(1): 5'-3 attached terminal deoxyabasic moeity
  misc_feature (4)..(5): 2'-deoxy-2'-fluoro
  misc_feature (8)..(9): 2'-deoxy-2'-fluoro
  misc_feature (11)..(11): 2'-deoxy-2'-fluoro
  misc_feature (14)..(14): 2'-deoxy-2'-fluoro
  misc_feature (18)..(18): 2'-deoxy-2'-fluoro
  misc_feature (1)..(19): RNA
  misc_feature (21)..(21): 3'-3 attached terminal deoxyabasic moeity
gaguugaccguaacagacatt

SEQ ID NO: 1426 - DNA, 21 bp, Artificial Sequence
  Synthetic
  misc_feature (1)..(1): 5'-3 attached terminal deoxyabasic moeity
  misc_feature (1)..(1): 2'-deoxy-2'-fluoro
  misc_feature (4)..(4): 2'-deoxy-2'-fluoro
  misc_feature (8)..(8): 2'-deoxy-2'-fluoro
  misc_feature (10)..(14): 2'-deoxy-2'-fluoro
  misc_feature (16)..(17): 2'-deoxy-2'-fluoro
  misc_feature (19)..(19): 2'-deoxy-2'-fluoro
  misc_feature (1)..(19): RNA
  misc_feature (21)..(21): 3'-3 attached terminal deoxyabasic moeity
uaacagacaucuuugcugctt

SEQ ID NO: 1427 - DNA, 21 bp, Artificial Sequence
  Synthetic
  misc_feature (1)..(1): 5'-3 attached terminal deoxyabasic moeity
  misc_feature (1)..(4): 2'-deoxy-2'-fluoro
  misc_feature (10)..(10): 2'-deoxy-2'-fluoro
  misc_feature (12)..(12): 2'-deoxy-2'-fluoro
  misc_feature (15)..(16): 2'-deoxy-2'-fluoro
  misc_feature (1)..(19): RNA
  misc_feature (21)..(21): 3'-3 attached terminal deoxyabasic moeity
cuccaagaacacaacugagtt

SEQ ID NO: 1428 - DNA, 21 bp, Artificial Sequence
  Synthetic
  misc_feature (1)..(1): 5'-3 attached terminal deoxyabasic moeity
  misc_feature (1)..(1): 2'-deoxy-2'-fluoro
  misc_feature (3)..(3): 2'-deoxy-2'-fluoro
  misc_feature (6)..(7): 2'-deoxy-2'-fluoro
  misc_feature (9)..(10): 2'-deoxy-2'-fluoro
  misc_feature (12)..(12): 2'-deoxy-2'-fluoro
  misc_feature (1)..(19): RNA
  misc_feature (21)..(21): 3'-3 attached terminal deoxyabasic moeity
uacagccaccaugagaaggtt

SEQ ID NO: 1429 - DNA, 21 bp, Artificial Sequence
  Synthetic
  misc_feature (1)..(1): 5'-3 attached terminal deoxyabasic moeity
  misc_feature (4)..(8): 2'-deoxy-2'-fluoro
  misc_feature (10)..(13): 2'-deoxy-2'-fluoro
  misc_feature (16)..(16): 2'-deoxy-2'-fluoro
  misc_feature (1)..(19): RNA
  misc_feature (21)..(21): 3'-3 attached terminal deoxyabasic moeity
gaauuccuguccugugaagtt

SEQ ID NO: 1430 - DNA, 21 bp, Artificial Sequence
  Synthetic
  misc_feature (1)..(1): 5'-3 attached terminal deoxyabasic moeity
  misc_feature (7)..(8): 2'-deoxy-2'-fluoro
  misc_feature (11)..(12): 2'-deoxy-2'-fluoro
  misc_feature (17)..(17): 2'-deoxy-2'-fluoro
  misc_feature (19)..(19): 2'-deoxy-2'-fluoro
  misc_feature (1)..(19): RNA
  misc_feature (21)..(21): 3'-3 attached terminal deoxyabasic moeity
aggaagccaaccagaguactt

SEQ ID NO: 1431 - DNA, 21 bp, Artificial Sequence
  Synthetic
  misc_feature (2)..(7): 2'-deoxy-2'-fluoro
  misc_feature (9)..(12): 2'-deoxy-2'-fluoro
  misc_feature (14)..(14): 2'-deoxy-2'-fluoro
  misc_feature (19)..(19): 2'-deoxy-2'-fluoro
  misc_feature (20)..(20): Phosphorothioate 3'-Internucleotide Linkage
  misc_feature (1)..(19): RNA
gucuucugcucugugaggctt

SEQ ID NO: 1432 - DNA, 21 bp, Artificial Sequence
  Synthetic
  misc_feature (4)..(9): 2'-deoxy-2'-fluoro
  misc_feature (11)..(14): 2'-deoxy-2'-fluoro
  misc_feature (16)..(16): 2'-deoxy-2'-fluoro
  misc_feature (20)..(20): Phosphorothioate 3'-Internucleotide Linkage
  misc_feature (1)..(19): RNA
gagucuucugcucugugagtt

SEQ ID NO: 1433 - DNA, 21 bp, Artificial Sequence
  Synthetic
  misc_feature (1)..(1): 2'-deoxy-2'-fluoro
  misc_feature (3)..(5): 2'-deoxy-2'-fluoro
  misc_feature (7)..(8): 2'-deoxy-2'-fluoro
  misc_feature (10)..(10): 2'-deoxy-2'-fluoro
  misc_feature (13)..(14): 2'-deoxy-2'-fluoro
  misc_feature (17)..(19): 2'-deoxy-2'-fluoro
  misc_feature (20)..(20): Phosphorothioate 3'-Internucleotide Linkage
  misc_feature (1)..(19): RNA
ugucuguuacggucaacuctt

SEQ ID NO: 1434 - DNA, 21 bp, Artificial Sequence
  Synthetic
  misc_feature (2)..(2): 2'-deoxy-2'-fluoro
  misc_feature (5)..(5): 2'-deoxy-2'-fluoro
  misc_feature (11)..(11): 2'-deoxy-2'-fluoro
  misc_feature (13)..(15): 2'-deoxy-2'-fluoro
  misc_feature (17)..(18): 2'-deoxy-2'-fluoro
  misc_feature (20)..(20): Phosphorothioate 3'-Internucleotide Linkage
  misc_feature (1)..(19): RNA
gcagcaaagaugucuguuatt

SEQ ID NO: 1435 - DNA, 21 bp, Artificial Sequence
  Synthetic
  misc_feature (1)..(3): 2'-deoxy-2'-fluoro
  misc_feature (6)..(7): 2'-deoxy-2'-fluoro
  misc_feature (9)..(9): 2'-deoxy-2'-fluoro
  misc_feature (11)..(15): 2'-deoxy-2'-fluoro
  misc_feature (20)..(20): Phosphorothioate 3'-Internucleotide Linkage
  misc_feature (1)..(19): RNA
cucaguuguguucuuggagtt

SEQ ID NO: 1436 - DNA, 21 bp, Artificial Sequence
  Synthetic
  misc_feature (1)..(7): 2'-deoxy-2'-fluoro
  misc_feature (9)..(9): 2'-deoxy-2'-fluoro
  misc_feature (12)..(12): 2'-deoxy-2'-fluoro
  misc_feature (15)..(16): 2'-deoxy-2'-fluoro
  misc_feature (18)..(18): 2'-deoxy-2'-fluoro
  misc_feature (20)..(20): Phosphorothioate 3'-Internucleotide Linkage
  misc_feature (1)..(19): RNA
ccuucucaugguggcuguatt

SEQ ID NO: 1437 - DNA, 21 bp, Artificial Sequence
  Synthetic
  misc_feature (1)..(4): 2'-deoxy-2'-fluoro
  misc_feature (6)..(6): 2'-deoxy-2'-fluoro
  misc_feature (11)..(11): 2'-deoxy-2'-fluoro
  misc_feature (17)..(19): 2'-deoxy-2'-fluoro
  misc_feature (20)..(20): Phosphorothioate 3'-Internucleotide Linkage
  misc_feature (1)..(19): RNA
cuucacaggacaggaauuctt

SEQ ID NO: 1438 - DNA, 21 bp, Artificial Sequence
  Synthetic
  misc_feature (2)..(2): 2'-deoxy-2'-fluoro
  misc_feature (4)..(7): 2'-deoxy-2'-fluoro
  misc_feature (10)..(11): 2'-deoxy-2'-fluoro
  misc_feature (14)..(19): 2'-deoxy-2'-fluoro
  misc_feature (20)..(20): Phosphorothioate 3'-Internucleotide Linkage
  misc_feature (1)..(19): RNA
guacucugguuggcuuccutt

SEQ ID NO: 1439 - DNA, 21 bp, Artificial Sequence
  Synthetic
  misc_feature (1)..(1): 5'-3 attached terminal deoxyabasic moeity
  misc_feature (1)..(1): 2'-deoxy
  misc_feature (2)..(5): 2'-deoxy-2'-fluoro
  misc_feature (6)..(6): 2'-deoxy
  misc_feature (7)..(7): 2'-deoxy-2'-fluoro
  misc_feature (8)..(11): 2'-deoxy
  misc_feature (12)..(12): 2'-deoxy-2'-fluoro
  misc_feature (13)..(18): 2'-deoxy
  misc_feature (19)..(19): 2'-deoxy-2'-fluoro
  misc_feature (1)..(19): RNA
  misc_feature (21)..(21): 3'-3 attached terminal deoxyabasic moeity
gccucacagagcagaagactt

SEQ ID NO: 1440 - DNA, 21 bp, Artificial Sequence
  Synthetic
  misc_feature (1)..(1): 5'-3 attached terminal deoxyabasic moeity
  misc_feature (1)..(3): 2'-deoxy-2'-fluoro
  misc_feature (4)..(4): 2'-deoxy
  misc_feature (5)..(5): 2'-deoxy-2'-fluoro
  misc_feature (6)..(9): 2'-deoxy
  misc_feature (10)..(10): 2'-deoxy-2'-fluoro
  misc_feature (11)..(16): 2'-deoxy
  misc_feature (17)..(19): 2'-deoxy-2'-fluoro
  misc_feature (1)..(19): RNA
  misc_feature (21)..(21): 3'-3 attached terminal deoxyabasic moeity
cucacagagcagaagacuctt

SEQ ID NO: 1441 - DNA, 21 bp, Artificial Sequence
  Synthetic
  misc_feature (1)..(1): 5'-3 attached terminal deoxyabasic moeity
  misc_feature (1)..(3): 2'-deoxy
  misc_feature (4)..(5): 2'-deoxy-2'-fluoro
  misc_feature (6)..(7): 2'-deoxy
  misc_feature (8)..(9): 2'-deoxy-2'-fluoro
  misc_feature (10)..(10): 2'-deoxy
  misc_feature (11)..(11): 2'-deoxy-2'-fluoro
  misc_feature (12)..(13): 2'-deoxy
  misc_feature (14)..(14): 2'-deoxy-2'-fluoro
  misc_feature (15)..(17): 2'-deoxy
  misc_feature (18)..(18): 2'-deoxy-2'-fluoro
  misc_feature (19)..(19): 2'-deoxy
  misc_feature (1)..(19): RNA
  misc_feature (21)..(21): 3'-3 attached terminal deoxyabasic moeity
gaguugaccguaacagacatt

SEQ ID NO: 1442 - DNA, 21 bp, Artificial Sequence
  Synthetic
  misc_feature (1)..(1): 5'-3 attached terminal deoxyabasic moeity
  misc_feature (1)..(1): 2'-deoxy-2'-fluoro
  misc_feature (2)..(3): 2'-deoxy
  misc_feature (4)..(4): 2'-deoxy-2'-fluoro
  misc_feature (5)..(7): 2'-deoxy
  misc_feature (8)..(8): 2'-deoxy-2'-fluoro
  misc_feature (9)..(9): 2'-deoxy
  misc_feature (10)..(14): 2'-deoxy-2'-fluoro
  misc_feature (15)..(15): 2'-deoxy
  misc_feature (16)..(17): 2'-deoxy-2'-fluoro
  misc_feature (18)..(18): 2'-deoxy
  misc_feature (19)..(19): 2'-deoxy-2'-fluoro
  misc_feature (1)..(19): RNA
  misc_feature (21)..(21): 3'-3 attached terminal deoxyabasic moeity
uaacagacaucuuugcugctt

SEQ ID NO: 1443 - DNA, 21 bp, Artificial Sequence
  Synthetic
  misc_feature (1)..(1): 5'-3 attached terminal deoxyabasic moeity
  misc_feature (1)..(4): 2'-deoxy-2'-fluoro
  misc_feature (5)..(9): 2'-deoxy
  misc_feature (10)..(10): 2'-deoxy-2'-fluoro
  misc_feature (11)..(11): 2'-deoxy
  misc_feature (12)..(12): 2'-deoxy-2'-fluoro
  misc_feature (13)..(14): 2'-deoxy
  misc_feature (15)..(16): 2'-deoxy-2'-fluoro
  misc_feature (17)..(19): 2'-deoxy
  misc_feature (1)..(19): RNA
  misc_feature (21)..(21): 3'-3 attached terminal deoxyabasic moeity
cuccaagaacacaacugagtt

SEQ ID NO: 1444 - DNA, 21 bp, Artificial Sequence
  Synthetic
  misc_feature (1)..(1): 5'-3 attached terminal deoxyabasic moeity
  misc_feature (1)..(1): 2'-deoxy-2'-fluoro
  misc_feature (2)..(2): 2'-deoxy
  misc_feature (3)..(3): 2'-deoxy-2'-fluoro
  misc_feature (4)..(5): 2'-deoxy
  misc_feature (6)..(7): 2'-deoxy-2'-fluoro
  misc_feature (8)..(8): 2'-deoxy
  misc_feature (9)..(10): 2'-deoxy-2'-fluoro
  misc_feature (11)..(11): 2'-deoxy
  misc_feature (12)..(12): 2'-deoxy-2'-fluoro
  misc_feature (13)..(19): 2'-deoxy
  misc_feature (1)..(19): RNA
  misc_feature (21)..(21): 3'-3 attached terminal deoxyabasic moeity
uacagccaccaugagaaggtt

SEQ ID NO: 1445 - DNA, 21 bp, Artificial Sequence
  Synthetic
  misc_feature (1)..(1): 5'-3 attached terminal deoxyabasic moeity
  misc_feature (1)..(3): 2'-deoxy
  misc_feature (4)..(8): 2'-deoxy-2'-fluoro
  misc_feature (9)..(9): 2'-deoxy
  misc_feature (10)..(13): 2'-deoxy-2'-fluoro
  misc_feature (14)..(14): 2'-deoxy
  misc_feature (15)..(15): 2'-deoxy-2'-fluoro
  misc_feature (16)..(19): 2'-deoxy
  misc_feature (1)..(19): RNA
  misc_feature (21)..(21): 3'-3 attached terminal deoxyabasic moeity
gaauuccuguccugugaagtt

SEQ ID NO: 1446 - DNA, 21 bp, Artificial Sequence
  Synthetic
  misc_feature (1)..(1): 5'-3 attached terminal deoxyabasic moeity
  misc_feature (1)..(6): 2'-deoxy
  misc_feature (7)..(8): 2'-deoxy-2'-fluoro
  misc_feature (9)..(10): 2'-deoxy
  misc_feature (11)..(12): 2'-deoxy-2'-fluoro
  misc_feature (13)..(16): 2'-deoxy
  misc_feature (17)..(17): 2'-deoxy-2'-fluoro
  misc_feature (18)..(18): 2'-deoxy
  misc_feature (19)..(19): 2'-deoxy-2'-fluoro
  misc_feature (1)..(19): RNA
  misc_feature (21)..(21): 3'-3 attached terminal deoxyabasic moeity
aggaagccaaccagaguactt

SEQ ID NO: 1447 - DNA, 21 bp, Artificial Sequence
  Synthetic
  misc_feature (1)..(1): 2'-deoxy
  misc_feature (2)..(7): 2'-deoxy-2'-fluoro
  misc_feature (8)..(8): 2'-deoxy
  misc_feature (9)..(12): 2'-deoxy-2'-fluoro
  misc_feature (13)..(13): 2'-deoxy
  misc_feature (14)..(14): 2'-deoxy-2'-fluoro
  misc_feature (15)..(18): 2'-deoxy
  misc_feature (19)..(19): 2'-deoxy-2'-fluoro
  misc_feature (20)..(20): Phosphorothioate 3'-Internucleotide Linkage
  misc_feature (1)..(19): RNA
gucuucugcucugugaggctt

SEQ ID NO: 1448 - DNA, 21 bp, Artificial Sequence
  Synthetic
  misc_feature (1)..(3): 2'-deoxy
  misc_feature (4)..(9): 2'-deoxy-2'-fluoro
  misc_feature (10)..(10): 2'-deoxy
  misc_feature (11)..(14): 2'-deoxy-2'-fluoro
  misc_feature (15)..(15): 2'-deoxy
  misc_feature (16)..(16): 2'-deoxy-2'-fluoro
  misc_feature (17)..(19): 2'-deoxy
  misc_feature (20)..(20): Phosphorothioate 3'-Internucleotide Linkage
  misc_feature (1)..(19): RNA
gagucuucugcucugugagtt

SEQ ID NO: 1449 - DNA, 21 bp, Artificial Sequence
  Synthetic
  misc_feature (1)..(1): 2'-deoxy-2'-fluoro
  misc_feature (2)..(2): 2'-deoxy
  misc_feature (3)..(5): 2'-deoxy-2'-fluoro
  misc_feature (6)..(6): 2'-deoxy
  misc_feature (7)..(8): 2'-deoxy-2'-fluoro
  misc_feature (9)..(9): 2'-deoxy
  misc_feature (10)..(10): 2'-deoxy-2'-fluoro
  misc_feature (11)..(12): 2'-deoxy
  misc_feature (13)..(14): 2'-deoxy-2'-fluoro
  misc_feature (15)..(16): 2'-deoxy
  misc_feature (17)..(19): 2'-deoxy-2'-fluoro
  misc_feature (20)..(20): Phosphorothioate 3'-Internucleotide Linkage
  misc_feature (1)..(19): RNA
ugucuguuacggucaacuctt

SEQ ID NO: 1450 - DNA, 21 bp, Artificial Sequence
  Synthetic
  misc_feature (1)..(1): 2'-deoxy
  misc_feature (2)..(2): 2'-deoxy-2'-fluoro
  misc_feature (3)..(4): 2'-deoxy
  misc_feature (5)..(5): 2'-deoxy-2'-fluoro
  misc_feature (6)..(10): 2'-deoxy
  misc_feature (11)..(11): 2'-deoxy-2'-fluoro
  misc_feature (12)..(12): 2'-deoxy
  misc_feature (13)..(15): 2'-deoxy-2'-fluoro
  misc_feature (16)..(16): 2'-deoxy
  misc_feature (17)..(18): 2'-deoxy-2'-fluoro
  misc_feature (19)..(19): 2'-deoxy
  misc_feature (20)..(20): Phosphorothioate 3'-Internucleotide Linkage
  misc_feature (1)..(19): RNA
gcagcaaagaugucuguuatt

SEQ ID NO: 1451 - DNA, 21 bp, Artificial Sequence
  Synthetic
  misc_feature (1)..(3): 2'-deoxy-2'-fluoro
  misc_feature (4)..(5): 2'-deoxy
  misc_feature (6)..(7): 2'-deoxy-2'-fluoro
  misc_feature (8)..(8): 2'-deoxy
  misc_feature (9)..(9): 2'-deoxy-2'-fluoro
  misc_feature (10)..(10): 2'-deoxy
  misc_feature (11)..(15): 2'-deoxy-2'-fluoro
  misc_feature (16)..(19): 2'-deoxy
  misc_feature (20)..(20): Phosphorothioate 3'-Internucleotide Linkage
  misc_feature (1)..(19): RNA
cucaguuguguucuuggagtt

SEQ ID NO: 1452 - DNA, 21 bp, Artificial Sequence
  Synthetic
  misc_feature (1)..(7): 2'-deoxy-2'-fluoro
  misc_feature (8)..(8): 2'-deoxy
  misc_feature (9)..(9): 2'-deoxy-2'-fluoro
  misc_feature (10)..(11): 2'-deoxy
  misc_feature (12)..(12): 2'-deoxy-2'-fluoro
  misc_feature (13)..(14): 2'-deoxy
  misc_feature (15)..(16): 2'-deoxy-2'-fluoro
  misc_feature (17)..(17): 2'-deoxy
  misc_feature (18)..(18): 2'-deoxy-2'-fluoro
  misc_feature (19)..(19): 2'-deoxy
  misc_feature (20)..(20): Phosphorothioate 3'-Internucleotide Linkage
  misc_feature (1)..(19): RNA
ccuucucaugguggcuguatt

SEQ ID NO: 1453 - DNA, 21 bp, Artificial Sequence
  Synthetic
  misc_feature (1)..(4): 2'-deoxy-2'-fluoro
  misc_feature (5)..(5): 2'-deoxy
  misc_feature (6)..(6): 2'-deoxy-2'-fluoro
  misc_feature (7)..(10): 2'-deoxy
  misc_feature (11)..(11): 2'-deoxy-2'-fluoro
  misc_feature (12)..(16): 2'-deoxy
  misc_feature (17)..(19): 2'-deoxy-2'-fluoro
  misc_feature (20)..(20): Phosphorothioate 3'-Internucleotide Linkage
  misc_feature (1)..(19): RNA
cuucacaggacaggaauuctt

SEQ ID NO: 1454 - DNA, 21 bp, Artificial Sequence
  Synthetic
  misc_feature (1)..(1): 2'-deoxy
  misc_feature (2)..(2): 2'-deoxy-2'-fluoro
  misc_feature (3)..(3): 2'-deoxy
  misc_feature (4)..(7): 2'-deoxy-2'-fluoro
  misc_feature (8)..(9): 2'-deoxy
  misc_feature (10)..(11): 2'-deoxy-2'-fluoro
  misc_feature (12)..(13): 2'-deoxy
  misc_feature (14)..(19): 2'-deoxy-2'-fluoro
  misc_feature (20)..(20): Phosphorothioate 3'-Internucleotide Linkage
  misc_feature (1)..(19): RNA
guacucugguuggcuuccutt

SEQ ID NO: 1455 - DNA, 21 bp, Artificial Sequence
  Synthetic
  misc_feature (1)..(1): 5'-3 attached terminal deoxyabasic moeity
  misc_feature (1)..(1): 2'-O-methyl
  misc_feature (2)..(5): 2'-deoxy-2'-fluoro
  misc_feature (6)..(6): 2'-O-methyl
  misc_feature (7)..(7): 2'-deoxy-2'-fluoro
  misc_feature (8)..(11): 2'-O-methyl
  misc_feature (12)..(12): 2'-deoxy-2'-fluoro
  misc_feature (13)..(18): 2'-O-methyl
  misc_feature (19)..(19): 2'-deoxy-2'-fluoro
  misc_feature (1)..(19): RNA
  misc_feature (21)..(21): 3'-3 attached terminal deoxyabasic moeity
gccucacagagcagaagactt

SEQ ID NO: 1456 - DNA, 21 bp, Artificial Sequence
  Synthetic
  misc_feature (1)..(1): 5'-3 attached terminal deoxyabasic moeity
  misc_feature (1)..(3): 2'-deoxy-2'-fluoro
  misc_feature (4)..(4): 2'-O-methyl
  misc_feature (5)..(5): 2'-deoxy-2'-fluoro
  misc_feature (6)..(9): 2'-O-methyl
  misc_feature (10)..(10): 2'-deoxy-2'-fluoro
  misc_feature (11)..(16): 2'-O-methyl
  misc_feature (17)..(19): 2'-deoxy-2'-fluoro
  misc_feature (1)..(19): RNA
  misc_feature (21)..(21): 3'-3 attached terminal deoxyabasic moeity
cucacagagcagaagacuctt

SEQ ID NO: 1457 - DNA, 21 bp, Artificial Sequence
  Synthetic
  misc_feature (1)..(1): 5'-3 attached terminal deoxyabasic moeity
  misc_feature (1)..(3): 2'-O-methyl
  misc_feature (4)..(5): 2'-deoxy-2'-fluoro
  misc_feature (6)..(7): 2'-O-methyl
  misc_feature (8)..(9): 2'-deoxy-2'-fluoro
  misc_feature (10)..(10): 2'-O-methyl
  misc_feature (11)..(11): 2'-deoxy-2'-fluoro
  misc_feature (12)..(13): 2'-O-methyl
  misc_feature (14)..(14): 2'-deoxy-2'-fluoro
  misc_feature (15)..(17): 2'-O-methyl
  misc_feature (18)..(18): 2'-deoxy-2'-fluoro
  misc_feature (19)..(19): 2'-O-methyl
  misc_feature (1)..(19): RNA
  misc_feature (21)..(21): 3'-3 attached terminal deoxyabasic moeity
gaguugaccguaacagacatt

SEQ ID NO: 1458 - DNA, 21 bp, Artificial Sequence
  Synthetic
  misc_feature (1)..(1): 5'-3 attached terminal deoxyabasic moeity
  misc_feature (1)..(1): 2'-deoxy-2'-fluoro
  misc_feature (2)..(3): 2'-O-methyl
  misc_feature (4)..(4): 2'-deoxy-2'-fluoro
  misc_feature (5)..(7): 2'-O-methyl
  misc_feature (8)..(8): 2'-deoxy-2'-fluoro
  misc_feature (9)..(9): 2'-O-methyl
  misc_feature (10)..(14): 2'-deoxy-2'-fluoro
  misc_feature (15)..(15): 2'-O-methyl
  misc_feature (16)..(17): 2'-deoxy-2'-fluoro
  misc_feature (18)..(18): 2'-O-methyl
  misc_feature (19)..(19): 2'-deoxy-2'-fluoro
  misc_feature (1)..(19): RNA
  misc_feature (21)..(21): 3'-3 attached terminal deoxyabasic moeity
uaacagacaucuuugcugctt

SEQ ID NO: 1459 - DNA, 21 bp, Artificial Sequence
  Synthetic
  misc_feature (1)..(1): 5'-3 attached terminal deoxyabasic moeity
  misc_feature (1)..(4): 2'-deoxy-2'-fluoro
  misc_feature (5)..(9): 2'-O-methyl
  misc_feature (10)..(10): 2'-deoxy-2'-fluoro
  misc_feature (11)..(11): 2'-O-methyl
  misc_feature (12)..(12): 2'-deoxy-2'-fluoro
  misc_feature (13)..(14): 2'-O-methyl
  misc_feature (15)..(16): 2'-deoxy-2'-fluoro
  misc_feature (17)..(19): 2'-O-methyl
  misc_feature (1)..(19): RNA
  misc_feature (21)..(21): 3'-3 attached terminal deoxyabasic moeity
cuccaagaacacaacugagtt

SEQ ID NO: 1460 - DNA, 21 bp, Artificial Sequence
  Synthetic
  misc_feature (1)..(1): 5'-3 attached terminal deoxyabasic moeity
  misc_feature (1)..(1): 2'-deoxy-2'-fluoro
  misc_feature (2)..(2): 2'-O-methyl
  misc_feature (3)..(3): 2'-deoxy-2'-fluoro
  misc_feature (4)..(5): 2'-O-methyl
  misc_feature (6)..(7): 2'-deoxy-2'-fluoro
  misc_feature (8)..(8): 2'-O-methyl
  misc_feature (9)..(10): 2'-deoxy-2'-fluoro
  misc_feature (11)..(11): 2'-O-methyl
  misc_feature (12)..(12): 2'-deoxy-2'-fluoro
  misc_feature (13)..(19): 2'-O-methyl
  misc_feature (1)..(19): RNA
  misc_feature (21)..(21): 3'-3 attached terminal deoxyabasic moeity
uacagccaccaugagaaggtt

SEQ ID NO: 1461 - DNA, 21 bp, Artificial Sequence
  Synthetic
  misc_feature (1)..(1): 5'-3 attached terminal deoxyabasic moeity
  misc_feature (1)..(3): 2'-O-methyl
  misc_feature (4)..(8): 2'-deoxy-2'-fluoro
  misc_feature (9)..(9): 2'-O-methyl
  misc_feature (10)..(13): 2'-deoxy-2'-fluoro
  misc_feature (14)..(14): 2'-O-methyl
  misc_feature (15)..(15): 2'-deoxy-2'-fluoro
  misc_feature (16)..(19): 2'-O-methyl
  misc_feature (1)..(19): RNA
  misc_feature (21)..(21): 3'-3 attached terminal deoxyabasic moeity
gaauuccuguccugugaagtt

SEQ ID NO: 1462 - DNA, 21 bp, Artificial Sequence
  Synthetic
  misc_feature (1)..(1): 5'-3 attached terminal deoxyabasic moeity
  misc_feature (1)..(6): 2'-O-methyl
  misc_feature (7)..(8): 2'-deoxy-2'-fluoro
  misc_feature (9)..(10): 2'-O-methyl
  misc_feature (11)..(12): 2'-deoxy-2'-fluoro
  misc_feature (13)..(16): 2'-O-methyl
  misc_feature (17)..(17): 2'-deoxy-2'-fluoro
  misc_feature (18)..(18): 2'-O-methyl
  misc_feature (19)..(19): 2'-deoxy-2'-fluoro
  misc_feature (1)..(19): RNA
  misc_feature (21)..(21): 3'-3 attached terminal deoxyabasic moeity
aggaagccaaccagaguactt

SEQ ID NO: 1463 - DNA, 21 bp, Artificial Sequence
  Synthetic
  misc_feature (1)..(1): 2'-O-methyl
  misc_feature (2)..(7): 2'-deoxy-2'-fluoro
  misc_feature (8)..(8): 2'-O-methyl
  misc_feature (9)..(12): 2'-deoxy-2'-fluoro
  misc_feature (13)..(13): 2'-O-methyl
  misc_feature (14)..(14): 2'-deoxy-2'-fluoro
  misc_feature (15)..(19): 2'-O-methyl
  misc_feature (19)..(19): 2'-deoxy-2'-fluoro
  misc_feature (20)..(20): Phosphorothioate 3'-Internucleotide Linkage
  misc_feature (1)..(19): RNA
gucuucugcucugugaggctt

SEQ ID NO: 1464 - DNA, 21 bp, Artificial Sequence
  Synthetic
  misc_feature (1)..(3): 2'-O-methyl
  misc_feature (4)..(9): 2'-deoxy-2'-fluoro
  misc_feature (10)..(10): 2'-O-methyl
  misc_feature (11)..(14): 2'-deoxy-2'-fluoro
  misc_feature (15)..(19): 2'-O-methyl
  misc_feature (16)..(16): 2'-deoxy-2'-fluoro
  misc_feature (20)..(20): Phosphorothioate 3'-Internucleotide Linkage
  misc_feature (1)..(19): RNA
gagucuucugcucugugagtt

SEQ ID NO: 1465 - DNA, 21 bp, Artificial Sequence
  Synthetic
  misc_feature (1)..(1): 2'-deoxy-2'-fluoro
  misc_feature (2)..(2): 2'-O-methyl
  misc_feature (3)..(5): 2'-deoxy-2'-fluoro
  misc_feature (6)..(6): 2'-O-methyl
  misc_feature (7)..(8): 2'-deoxy-2'-fluoro
  misc_feature (9)..(9): 2'-O-methyl
  misc_feature (10)..(10): 2'-deoxy-2'-fluoro
  misc_feature (11)..(12): 2'-O-methyl
  misc_feature (13)..(14): 2'-deoxy-2'-fluoro
  misc_feature (15)..(16): 2'-O-methyl
  misc_feature (17)..(19): 2'-deoxy-2'-fluoro
  misc_feature (20)..(20): Phosphorothioate 3'-Internucleotide Linkage
  misc_feature (1)..(19): RNA
ugucuguuacggucaacuctt

SEQ ID NO: 1466 - DNA, 21 bp, Artificial Sequence
  Synthetic
  misc_feature (1)..(1): 2'-O-methyl
  misc_feature (2)..(2): 2'-deoxy-2'-fluoro
  misc_feature (3)..(4): 2'-O-methyl
  misc_feature (5)..(5): 2'-deoxy-2'-fluoro
  misc_feature (6)..(10): 2'-O-methyl
  misc_feature (11)..(11): 2'-deoxy-2'-fluoro
  misc_feature (12)..(12): 2'-O-methyl
  misc_feature (13)..(15): 2'-deoxy-2'-fluoro
  misc_feature (16)..(16): 2'-O-methyl
  misc_feature (17)..(18): 2'-deoxy-2'-fluoro
  misc_feature (19)..(19): 2'-O-methyl
  misc_feature (20)..(20): Phosphorothioate 3'-Internucleotide Linkage
  misc_feature (1)..(19): RNA
gcagcaaagaugucuguuatt

SEQ ID NO: 1467 - DNA, 21 bp, Artificial Sequence
  Synthetic
  misc_feature (1)..(3): 2'-deoxy-2'-fluoro
  misc_feature (4)..(5): 2'-O-methyl
  misc_feature (6)..(7): 2'-deoxy-2'-fluoro
  misc_feature (8)..(8): 2'-O-methyl
  misc_feature (9)..(9): 2'-deoxy-2'-fluoro
  misc_feature (10)..(10): 2'-O-methyl
  misc_feature (11)..(15): 2'-deoxy-2'-fluoro
  misc_feature (16)..(19): 2'-O-methyl
  misc_feature (20)..(20): Phosphorothioate 3'-Internucleotide Linkage
  misc_feature (1)..(19): RNA
cucaguuguguucuuggagtt

SEQ ID NO: 1468 - DNA, 21 bp, Artificial Sequence
  Synthetic
  misc_feature (1)..(7): 2'-deoxy-2'-fluoro
  misc_feature (8)..(8): 2'-O-methyl
  misc_feature (9)..(9): 2'-deoxy-2'-fluoro
  misc_feature (10)..(11): 2'-O-methyl
  misc_feature (12)..(12): 2'-deoxy-2'-fluoro
  misc_feature (13)..(14): 2'-O-methyl
  misc_feature (15)..(16): 2'-deoxy-2'-fluoro
  misc_feature (17)..(17): 2'-O-methyl
  misc_feature (18)..(18): 2'-deoxy-2'-fluoro
  misc_feature (19)..(19): 2'-O-methyl
  misc_feature (20)..(20): Phosphorothioate 3'-Internucleotide Linkage
  misc_feature (1)..(19): RNA
ccuucucaugguggcuguatt

SEQ ID NO: 1469 - DNA, 21 bp, Artificial Sequence
  Synthetic
  misc_feature (1)..(4): 2'-deoxy-2'-fluoro
  misc_feature (5)..(5): 2'-O-methyl
  misc_feature (6)..(6): 2'-deoxy-2'-fluoro
  misc_feature (7)..(10): 2'-O-methyl
  misc_feature (11)..(11): 2'-deoxy-2'-fluoro
  misc_feature (12)..(16): 2'-O-methyl
  misc_feature (17)..(19): 2'-deoxy-2'-fluoro
  misc_feature (20)..(20): Phosphorothioate 3'-Internucleotide Linkage
  misc_feature (1)..(19): RNA
cuucacaggacaggaauuctt

SEQ ID NO: 1470 - DNA, 21 bp, Artificial Sequence
  Synthetic
  misc_feature (1)..(1): 2'-O-methyl
  misc_feature (2)..(2): 2'-deoxy-2'-fluoro
  misc_feature (3)..(3): 2'-O-methyl
  misc_feature (4)..(7): 2'-deoxy-2'-fluoro
  misc_feature (8)..(9): 2'-O-methyl
  misc_feature (10)..(11): 2'-deoxy-2'-fluoro
  misc_feature (12)..(13): 2'-O-methyl
  misc_feature (14)..(19): 2'-deoxy-2'-fluoro
  misc_feature (20)..(20): Phosphorothioate 3'-Internucleotide Linkage
  misc_feature (1)..(19): RNA
guacucugguuggcuuccutt

SEQ ID NO: 1471 - DNA, 21 bp, Artificial Sequence
  Synthetic
  misc_feature (1)..(1): 5'-3 attached terminal deoxyabasic moeity
  misc_feature (1)..(19): RNA
  misc_feature (21)..(21): 3'-3 attached terminal deoxyabasic moeity
gccucacagagcagaagactt

SEQ ID NO: 1472 - DNA, 21 bp, Artificial Sequence
  Synthetic
  misc_feature (1)..(1): 5'-3 attached terminal deoxyabasic moeity
  misc_feature (1)..(19): RNA
  misc_feature (21)..(21): 3'-3 attached terminal deoxyabasic moeity
cucacagagcagaagacuctt

SEQ ID NO: 1473 - DNA, 21 bp, Artificial Sequence
  Synthetic
  misc_feature (1)..(1): 5'-3 attached terminal deoxyabasic moeity
  misc_feature (1)..(19): RNA
  misc_feature (21)..(21): 3'-3 attached terminal deoxyabasic moeity
gaguugaccguaacagacatt

SEQ ID NO: 1474 - DNA, 21 bp, Artificial Sequence
  Synthetic
  misc_feature (1)..(1): 5'-3 attached terminal deoxyabasic moeity
  misc_feature (1)..(19): RNA
  misc_feature (21)..(21): 3'-3 attached terminal deoxyabasic moeity
uaacagacaucuuugcugctt

SEQ ID NO: 1475 - DNA, 21 bp, Artificial Sequence
  Synthetic
  misc_feature (1)..(1): 5'-3 attached terminal deoxyabasic moeity
  misc_feature (1)..(19): RNA
  misc_feature (21)..(21): 3'-3 attached terminal deoxyabasic moeity
cuccaagaacacaacugagtt

SEQ ID NO: 1476 - DNA, 21 bp, Artificial Sequence
  Synthetic
  misc_feature (1)..(1): 5'-3 attached terminal deoxyabasic moeity
  misc_feature (1)..(19): RNA
  misc_feature (21)..(21): 3'-3 attached terminal deoxyabasic moeity
uacagccaccaugagaaggtt

SEQ ID NO: 1477 - DNA, 21 bp, Artificial Sequence
  Synthetic
  misc_feature (1)..(1): 5'-3 attached terminal deoxyabasic moeity
  misc_feature (1)..(19): RNA
  misc_feature (21)..(21): 3'-3 attached terminal deoxyabasic moeity
gaauuccuguccugugaagtt

SEQ ID NO: 1478 - DNA, 21 bp, Artificial Sequence
  Synthetic
  misc_feature (1)..(1): 5'-3 attached terminal deoxyabasic moeity
  misc_feature (1)..(19): RNA
  misc_feature (21)..(21): 3'-3 attached terminal deoxyabasic moeity
aggaagccaaccagaguactt

SEQ ID NO: 1479 - DNA, 21 bp, Artificial Sequence
  Synthetic
  misc_feature (20)..(20): Phosphorothioate 3'-Internucleotide Linkage
  misc_feature (1)..(19): RNA
gucuucugcucugugaggctt

SEQ ID NO: 1480 - DNA, 21 bp, Artificial Sequence
  Synthetic
  misc_feature (20)..(20): Phosphorothioate 3'-Internucleotide Linkage
  misc_feature (1)..(19): RNA
gagucuucugcucugugagtt

SEQ ID NO: 1481 - DNA, 21 bp, Artificial Sequence
  Synthetic
  misc_feature (20)..(20): Phosphorothioate 3'-Internucleotide Linkage
  misc_feature (1)..(19): RNA
ugucuguuacggucaacuctt

SEQ ID NO: 1482 - DNA, 21 bp, Artificial Sequence
  Synthetic
  misc_feature (20)..(20): Phosphorothioate 3'-Internucleotide Linkage
  misc_feature (1)..(19): RNA
gcagcaaagaugucuguuatt

SEQ ID NO: 1483 - DNA, 21 bp, Artificial Sequence
  Synthetic
  misc_feature (20)..(20): Phosphorothioate 3'-Internucleotide Linkage
  misc_feature (1)..(19): RNA
cucaguuguguucuuggagtt

SEQ ID NO: 1484 - DNA, 21 bp, Artificial Sequence
  Synthetic
  misc_feature (20)..(20): Phosphorothioate 3'-Internucleotide Linkage
  misc_feature (1)..(19): RNA
ccuucucaugguggcuguatt

SEQ ID NO: 1485 - DNA, 21 bp, Artificial Sequence
  Synthetic
  misc_feature (20)..(20): Phosphorothioate 3'-Internucleotide Linkage
  misc_feature (1)..(19): RNA
cuucacaggacaggaauuctt

SEQ ID NO: 1486 - DNA, 21 bp, Artificial Sequence
  Synthetic
  misc_feature (20)..(20): Phosphorothioate 3'-Internucleotide Linkage
  misc_feature (1)..(19): RNA
guacucugguuggcuuccutt

SEQ ID NO: 1487 - DNA, 21 bp, Artificial Sequence
  Synthetic
  misc_feature (2)..(7): 2'-deoxy-2'-fluoro
  misc_feature (9)..(12): 2'-deoxy-2'-fluoro
  misc_feature (14)..(14): 2'-deoxy-2'-fluoro
  misc_feature (19)..(19): 2'-deoxy-2'-fluoro
  misc_feature (1)..(19): RNA
  misc_feature (21)..(21): 3'-3 attached terminal deoxyabasic moeity
gucuucugcucugugaggctt

SEQ ID NO: 1488 - DNA, 21 bp, Artificial Sequence
  Synthetic
  misc_feature (4)..(9): 2'-deoxy-2'-fluoro
  misc_feature (11)..(14): 2'-deoxy-2'-fluoro
  misc_feature (16)..(16): 2'-deoxy-2'-fluoro
  misc_feature (1)..(19): RNA
  misc_feature (21)..(21): 3'-3 attached terminal deoxyabasic moeity
gagucuucugcucugugagtt

SEQ ID NO: 1489 - DNA, 21 bp, Artificial Sequence
  Synthetic
  misc_feature (1)..(1): 2'-deoxy-2'-fluoro
  misc_feature (3)..(5): 2'-deoxy-2'-fluoro
  misc_feature (7)..(8): 2'-deoxy-2'-fluoro
  misc_feature (10)..(10): 2'-deoxy-2'-fluoro
  misc_feature (13)..(14): 2'-deoxy-2'-fluoro
  misc_feature (17)..(19): 2'-deoxy-2'-fluoro
  misc_feature (1)..(19): RNA
  misc_feature (21)..(21): 3'-3 attached terminal deoxyabasic moeity
ugucuguuacggucaacuctt

SEQ ID NO: 1490 - DNA, 21 bp, Artificial Sequence
  Synthetic
  misc_feature (2)..(2): 2'-deoxy-2'-fluoro
  misc_feature (5)..(5): 2'-deoxy-2'-fluoro
  misc_feature (11)..(11): 2'-deoxy-2'-fluoro
  misc_feature (13)..(15): 2'-deoxy-2'-fluoro
  misc_feature (17)..(18): 2'-deoxy-2'-fluoro
  misc_feature (1)..(19): RNA
  misc_feature (21)..(21): 3'-3 attached terminal deoxyabasic moeity
gcagcaaagaugucuguuatt

SEQ ID NO: 1491 - DNA, 21 bp, Artificial Sequence
  Synthetic
  misc_feature (1)..(3): 2'-deoxy-2'-fluoro
  misc_feature (6)..(7): 2'-deoxy-2'-fluoro
  misc_feature (9)..(9): 2'-deoxy-2'-fluoro
  misc_feature (11)..(15): 2'-deoxy-2'-fluoro
  misc_feature (1)..(19): RNA
  misc_feature (21)..(21): 3'-3 attached terminal deoxyabasic moeity
cucaguuguguucuuggagtt

SEQ ID NO: 1492 - DNA, 21 bp, Artificial Sequence
  Synthetic
  misc_feature (1)..(7): 2'-deoxy-2'-fluoro
  misc_feature (9)..(9): 2'-deoxy-2'-fluoro
  misc_feature (12)..(12): 2'-deoxy-2'-fluoro
  misc_feature (15)..(16): 2'-deoxy-2'-fluoro
  misc_feature (18)..(18): 2'-deoxy-2'-fluoro
  misc_feature (1)..(19): RNA
  misc_feature (21)..(21): 3'-3 attached terminal deoxyabasic moeity
ccuucucaugguggcuguatt

SEQ ID NO: 1493 - DNA, 21 bp, Artificial Sequence
  Synthetic
  misc_feature (1)..(4): 2'-deoxy-2'-fluoro
  misc_feature (6)..(6): 2'-deoxy-2'-fluoro
  misc_feature (11)..(11): 2'-deoxy-2'-fluoro
  misc_feature (17)..(19): 2'-deoxy-2'-fluoro
  misc_feature (1)..(19): RNA
  misc_feature (21)..(21): 3'-3 attached terminal deoxyabasic moeity
cuucacaggacaggaauuctt

SEQ ID NO: 1494 - DNA, 21 bp, Artificial Sequence
  Synthetic
  misc_feature (2)..(2): 2'-deoxy-2'-fluoro
  misc_feature (4)..(7): 2'-deoxy-2'-fluoro
  misc_feature (10)..(11): 2'-deoxy-2'-fluoro
  misc_feature (14)..(19): 2'-deoxy-2'-fluoro
  misc_feature (1)..(19): RNA
  misc_feature (21)..(21): 3'-3 attached terminal deoxyabasic moeity
guacucugguuggcuuccutt

SEQ ID NO: 1495 - DNA, 21 bp, Artificial Sequence
  Synthetic
  misc_feature (1)..(19): RNA
  misc_feature (21)..(21): 3'-3 attached terminal deoxyabasic moeity
gucuucugcucugugaggctt

SEQ ID NO: 1496 - DNA, 21 bp, Artificial Sequence
  Synthetic
  misc_feature (1)..(19): RNA
  misc_feature (21)..(21): 3'-3 attached terminal deoxyabasic moeity
gagucuucugcucugugagtt

SEQ ID NO: 1497 - DNA, 21 bp, Artificial Sequence
  Synthetic
  misc_feature (1)..(19): RNA
  misc_feature (21)..(21): 3'-3 attached terminal deoxyabasic moeity
ugucuguuacggucaacuctt

SEQ ID NO: 1498 - DNA, 21 bp, Artificial Sequence
  Synthetic
  misc_feature (1)..(19): RNA
  misc_feature (21)..(21): 3'-3 attached terminal deoxyabasic moeity
gcagcaaagaugucuguuatt

SEQ ID NO: 1499 - DNA, 21 bp, Artificial Sequence
  Synthetic
  misc_feature (1)..(19): RNA
  misc_feature (21)..(21): 3'-3 attached terminal deoxyabasic moeity
cucaguuguguucuuggagtt

SEQ ID NO: 1500 - DNA, 21 bp, Artificial Sequence
  Synthetic
  misc_feature (1)..(19): RNA
  misc_feature (21)..(21): 3'-3 attached terminal deoxyabasic moeity
ccuucucaugguggcuguatt

SEQ ID NO: 1501 - DNA, 21 bp, Artificial Sequence
  Synthetic
  misc_feature (1)..(19): RNA
  misc_feature (21)..(21): 3'-3 attached terminal deoxyabasic moeity
cuucacaggacaggaauuctt

SEQ ID NO: 1502 - DNA, 21 bp, Artificial Sequence
  Synthetic
  misc_feature (1)..(19): RNA
  misc_feature (21)..(21): 3'-3 attached terminal deoxyabasic moeity
guacucugguuggcuuccutt

SEQ ID NO: 1503 - DNA, 21 bp, Artificial Sequence
  Synthetic
  misc_feature (1)..(19): RNA
auacacuggaccugugggctt

SEQ ID NO: 1504 - DNA, 21 bp, Artificial Sequence
  Synthetic
  misc_feature (1)..(19): RNA
aggaaaccugacaguucactt

SEQ ID NO: 1505 - DNA, 21 bp, Artificial Sequence
  Synthetic
  misc_feature (1)..(19): RNA
cacaacaugaaaagggaugtt

SEQ ID NO: 1506 - DNA, 21 bp, Artificial Sequence
  Synthetic
  misc_feature (1)..(19): RNA
acaacaugaaaagggaugatt

SEQ ID NO: 1507 - DNA, 21 bp, Artificial Sequence
  Synthetic
  misc_feature (1)..(19): RNA
gggaugaagauccucacaatt

SEQ ID NO: 1508 - DNA, 21 bp, Artificial Sequence
  Synthetic
  misc_feature (1)..(19): RNA
gggaaaucgaugagaaauutt

SEQ ID NO: 1509 - DNA, 21 bp, Artificial Sequence
  Synthetic
  misc_feature (1)..(19): RNA
ggaaaucgaugagaaauugtt

SEQ ID NO: 1510 - DNA, 21 bp, Artificial Sequence
  Synthetic
  misc_feature (1)..(19): RNA
auugccuagaggugcucautt

SEQ ID NO: 1511 - DNA, 21 bp, Artificial Sequence
  Synthetic
  misc_feature (1)..(19): RNA
gcccacagguccaguguautt

SEQ ID NO: 1512 - DNA, 21 bp, Artificial Sequence
  Synthetic
  misc_feature (1)..(19): RNA
gugaacugucagguuuccutt

SEQ ID NO: 1513 - DNA, 21 bp, Artificial Sequence
  Synthetic
  misc_feature (1)..(19): RNA
caucccuuuucauguugugtt

SEQ ID NO: 1514 - DNA, 21 bp, Artificial Sequence
  Synthetic
  misc_feature (1)..(19): RNA
ucaucccuuuucauguugutt

SEQ ID NO: 1515 - DNA, 21 bp, Artificial Sequence
  Synthetic
  misc_feature (1)..(19): RNA
uugugaggaucuucauccctt

SEQ ID NO: 1516 - DNA, 21 bp, Artificial Sequence
  Synthetic
  misc_feature (1)..(19): RNA
aauuucucaucgauuuccctt

SEQ ID NO: 1517 - DNA, 21 bp, Artificial Sequence
  Synthetic
  misc_feature (1)..(19): RNA
caauuucucaucgauuucctt

SEQ ID NO: 1518 - DNA, 21 bp, Artificial Sequence
  Synthetic
  misc_feature (1)..(19): RNA
augagcaccucuaggcaautt

SEQ ID NO: 1519 - DNA, 21 bp, Artificial Sequence
  Synthetic
  misc_feature (1)..(1): 5'-3 attached terminal deoxyabasic moeity
  misc_feature (2)..(2): 2'-deoxy-2'-fluoro
  misc_feature (4)..(4): 2'-deoxy-2'-fluoro
  misc_feature (6)..(7): 2'-deoxy-2'-fluoro
  misc_feature (11)..(13): 2'-deoxy-2'-fluoro
  misc_feature (15)..(15): 2'-deoxy-2'-fluoro
  misc_feature (19)..(19): 2'-deoxy-2'-fluoro
  misc_feature (1)..(19): RNA
  misc_feature (21)..(21): 3'-3 attached terminal deoxyabasic moeity
auacacuggaccugugggctt

SEQ ID NO: 1520 - DNA, 21 bp, Artificial Sequence
  Synthetic
  misc_feature (1)..(1): 5'-3 attached terminal deoxyabasic moeity
  misc_feature (7)..(9): 2'-deoxy-2'-fluoro
  misc_feature (12)..(12): 2'-deoxy-2'-fluoro
  misc_feature (15)..(17): 2'-deoxy-2'-fluoro
  misc_feature (19)..(19): 2'-deoxy-2'-fluoro
  misc_feature (1)..(19): RNA
  misc_feature (21)..(21): 3'-3 attached terminal deoxyabasic moeity
aggaaaccugacaguucactt

SEQ ID NO: 1521 - DNA, 21 bp, Artificial Sequence
  Synthetic
  misc_feature (1)..(1): 5'-3 attached terminal deoxyabasic moeity
  misc_feature (1)..(1): 2'-deoxy-2'-fluoro
  misc_feature (3)..(3): 2'-deoxy-2'-fluoro
  misc_feature (6)..(6): 2'-deoxy-2'-fluoro
  misc_feature (8)..(8): 2'-deoxy-2'-fluoro
  misc_feature (18)..(18): 2'-deoxy-2'-fluoro
  misc_feature (1)..(19): RNA
  misc_feature (21)..(21): 3'-3 attached terminal deoxyabasic moeity
cacaacaugaaaagggaugtt

SEQ ID NO: 1522 - DNA, 21 bp, Artificial Sequence
  Synthetic
  misc_feature (1)..(1): 5'-3 attached terminal deoxyabasic moeity
  misc_feature (2)..(2): 2'-deoxy-2'-fluoro
  misc_feature (5)..(5): 2'-deoxy-2'-fluoro
  misc_feature (7)..(7): 2'-deoxy-2'-fluoro
  misc_feature (17)..(17): 2'-deoxy-2'-fluoro
  misc_feature (1)..(19): RNA
  misc_feature (21)..(21): 3'-3 attached terminal deoxyabasic moeity
acaacaugaaaagggaugatt

SEQ ID NO: 1523 - DNA, 21 bp, Artificial Sequence
  Synthetic
  misc_feature (1)..(1): 5'-3 attached terminal deoxyabasic moeity
  misc_feature (5)..(5): 2'-deoxy-2'-fluoro
  misc_feature (11)..(15): 2'-deoxy-2'-fluoro
  misc_feature (17)..(17): 2'-deoxy-2'-fluoro
  misc_feature (1)..(19): RNA
  misc_feature (21)..(21): 3'-3 attached terminal deoxyabasic moeity
gggaugaagauccucacaatt

SEQ ID NO: 1524 - DNA, 21 bp, Artificial Sequence
  Synthetic
  misc_feature (1)..(1): 5'-3 attached terminal deoxyabasic moeity
  misc_feature (7)..(8): 2'-deoxy-2'-fluoro
  misc_feature (11)..(11): 2'-deoxy-2'-fluoro
  misc_feature (18)..(19): 2'-deoxy-2'-fluoro
  misc_feature (1)..(19): RNA
  misc_feature (21)..(21): 3'-3 attached terminal deoxyabasic moeity
gggaaaucgaugagaaauutt

SEQ ID NO: 1525 - DNA, 21 bp, Artificial Sequence
  Synthetic
  misc_feature (1)..(1): 5'-3 attached terminal deoxyabasic moeity
  misc_feature (6)..(7): 2'-deoxy-2'-fluoro
  misc_feature (10)..(10): 2'-deoxy-2'-fluoro
  misc_feature (17)..(18): 2'-deoxy-2'-fluoro
  misc_feature (1)..(19): RNA
  misc_feature (21)..(21): 3'-3 attached terminal deoxyabasic moeity
ggaaaucgaugagaaauugtt

SEQ ID NO: 1526 - DNA, 21 bp, Artificial Sequence
  Synthetic
  misc_feature (1)..(1): 5'-3 attached terminal deoxyabasic moeity
  misc_feature (2)..(3): 2'-deoxy-2'-fluoro
  misc_feature (5)..(7): 2'-deoxy-2'-fluoro
  misc_feature (13)..(13): 2'-deoxy-2'-fluoro
  misc_feature (15)..(17): 2'-deoxy-2'-fluoro
  misc_feature (19)..(19): 2'-deoxy-2'-fluoro
  misc_feature (1)..(19): RNA
  misc_feature (21)..(21): 3'-3 attached terminal deoxyabasic moeity
auugccuagaggugcucautt

SEQ ID NO: 1527 - DNA, 21 bp, Artificial Sequence
  Synthetic
  misc_feature (2)..(4): 2'-deoxy-2'-fluoro
  misc_feature (6)..(6): 2'-deoxy-2'-fluoro
  misc_feature (10)..(12): 2'-deoxy-2'-fluoro
  misc_feature (15)..(15): 2'-deoxy-2'-fluoro
  misc_feature (17)..(17): 2'-deoxy-2'-fluoro
  misc_feature (19)..(19): 2'-deoxy-2'-fluoro
  misc_feature (20)..(20): Phosphorothioate 3'-Internucleotide Linkage
  misc_feature (1)..(19): RNA
gcccacagguccaguguautt

SEQ ID NO: 1528 - DNA, 21 bp, Artificial Sequence
  Synthetic
  misc_feature (2)..(2): 2'-deoxy-2'-fluoro
  misc_feature (6)..(7): 2'-deoxy-2'-fluoro
  misc_feature (9)..(10): 2'-deoxy-2'-fluoro
  misc_feature (14)..(19): 2'-deoxy-2'-fluoro
  misc_feature (20)..(20): Phosphorothioate 3'-Internucleotide Linkage
  misc_feature (1)..(19): RNA
gugaacugucagguuuccutt

SEQ ID NO: 1529 - DNA, 21 bp, Artificial Sequence
  Synthetic
  misc_feature (1)..(1): 2'-deoxy-2'-fluoro
  misc_feature (3)..(11): 2'-deoxy-2'-fluoro
  misc_feature (13)..(13): 2'-deoxy-2'-fluoro
  misc_feature (15)..(16): 2'-deoxy-2'-fluoro
  misc_feature (18)..(18): 2'-deoxy-2'-fluoro
  misc_feature (20)..(20): Phosphorothioate 3'-Internucleotide Linkage
  misc_feature (1)..(19): RNA
caucccuuuucauguugugtt

SEQ ID NO: 1530 - DNA, 21 bp, Artificial Sequence
  Synthetic
  misc_feature (1)..(2): 2'-deoxy-2'-fluoro
  misc_feature (4)..(12): 2'-deoxy-2'-fluoro
  misc_feature (14)..(14): 2'-deoxy-2'-fluoro
  misc_feature (16)..(17): 2'-deoxy-2'-fluoro
  misc_feature (19)..(19): 2'-deoxy-2'-fluoro
  misc_feature (20)..(20): Phosphorothioate 3'-Internucleotide Linkage
  misc_feature (1)..(19): RNA
ucaucccuuuucauguugutt

SEQ ID NO: 1531 - DNA, 21 bp, Artificial Sequence
  Synthetic
  misc_feature (1)..(2): 2'-deoxy-2'-fluoro
  misc_feature (4)..(4): 2'-deoxy-2'-fluoro
  misc_feature (10)..(14): 2'-deoxy-2'-fluoro
  misc_feature (16)..(19): 2'-deoxy-2'-fluoro
  misc_feature (20)..(20): Phosphorothioate 3'-Internucleotide Linkage
  misc_feature (1)..(19): RNA
uugugaggaucuucauccctt

SEQ ID NO: 1532 - DNA, 21 bp, Artificial Sequence
  Synthetic
  misc_feature (3)..(8): 2'-deoxy-2'-fluoro
  misc_feature (10)..(11): 2'-deoxy-2'-fluoro
  misc_feature (14)..(19): 2'-deoxy-2'-fluoro
  misc_feature (20)..(20): Phosphorothioate 3'-Internucleotide Linkage
  misc_feature (1)..(19): RNA
aauuucucaucgauuuccctt

SEQ ID NO: 1533 - DNA, 21 bp, Artificial Sequence
  Synthetic
  misc_feature (1)..(1): 2'-deoxy-2'-fluoro
  misc_feature (4)..(9): 2'-deoxy-2'-fluoro
  misc_feature (11)..(12): 2'-deoxy-2'-fluoro
  misc_feature (15)..(19): 2'-deoxy-2'-fluoro
  misc_feature (20)..(20): Phosphorothioate 3'-Internucleotide Linkage
  misc_feature (1)..(19): RNA
caauuucucaucgauuucctt

SEQ ID NO: 1534 - DNA, 21 bp, Artificial Sequence
  Synthetic
  misc_feature (2)..(2): 2'-deoxy-2'-fluoro
  misc_feature (6)..(6): 2'-deoxy-2'-fluoro
  misc_feature (8)..(12): 2'-deoxy-2'-fluoro
  misc_feature (16)..(16): 2'-deoxy-2'-fluoro
  misc_feature (19)..(19): 2'-deoxy-2'-fluoro
  misc_feature (20)..(20): Phosphorothioate 3'-Internucleotide Linkage
  misc_feature (1)..(19): RNA
augagcaccucuaggcaautt

SEQ ID NO: 1535 - DNA, 21 bp, Artificial Sequence
  Synthetic
  misc_feature (1)..(1): 5'-3 attached terminal deoxyabasic moeity
  misc_feature (1)..(1): 2'-deoxy
  misc_feature (2)..(2): 2'-deoxy-2'-fluoro
  misc_feature (3)..(3): 2'-deoxy
  misc_feature (4)..(4): 2'-deoxy-2'-fluoro
  misc_feature (5)..(5): 2'-deoxy
  misc_feature (6)..(7): 2'-deoxy-2'-fluoro
  misc_feature (8)..(10): 2'-deoxy
  misc_feature (11)..(13): 2'-deoxy-2'-fluoro
  misc_feature (14)..(14): 2'-deoxy
  misc_feature (15)..(15): 2'-deoxy-2'-fluoro
  misc_feature (16)..(18): 2'-deoxy
  misc_feature (19)..(19): 2'-deoxy-2'-fluoro
  misc_feature (1)..(19): RNA
  misc_feature (21)..(21): 3'-3 attached terminal deoxyabasic moeity
auacacuggaccugugggctt

SEQ ID NO: 1536 - DNA, 21 bp, Artificial Sequence
  Synthetic
  misc_feature (1)..(1): 5'-3 attached terminal deoxyabasic moeity
  misc_feature (1)..(6): 2'-deoxy
  misc_feature (7)..(9): 2'-deoxy-2'-fluoro
  misc_feature (10)..(11): 2'-deoxy
  misc_feature (12)..(12): 2'-deoxy-2'-fluoro
  misc_feature (13)..(14): 2'-deoxy
  misc_feature (15)..(17): 2'-deoxy-2'-fluoro
  misc_feature (18)..(18): 2'-deoxy
  misc_feature (19)..(19): 2'-deoxy-2'-fluoro
  misc_feature (1)..(19): RNA
  misc_feature (21)..(21): 3'-3 attached terminal deoxyabasic moeity
aggaaaccugacaguucactt

SEQ ID NO: 1537 - DNA, 21 bp, Artificial Sequence
  Synthetic
  misc_feature (1)..(1): 5'-3 attached terminal deoxyabasic moeity
  misc_feature (1)..(1): 2'-deoxy-2'-fluoro
  misc_feature (2)..(2): 2'-deoxy
  misc_feature (3)..(3): 2'-deoxy-2'-fluoro
  misc_feature (4)..(5): 2'-deoxy
  misc_feature (6)..(6): 2'-deoxy-2'-fluoro
  misc_feature (7)..(7): 2'-deoxy
  misc_feature (8)..(8): 2'-deoxy-2'-fluoro
  misc_feature (9)..(17): 2'-deoxy
  misc_feature (18)..(18): 2'-deoxy-2'-fluoro
  misc_feature (19)..(19): 2'-deoxy
  misc_feature (1)..(19): RNA
  misc_feature (21)..(21): 3'-3 attached terminal deoxyabasic moeity
cacaacaugaaaagggaugtt

SEQ ID NO: 1538 - DNA, 21 bp, Artificial Sequence
  Synthetic
  misc_feature (1)..(1): 5'-3 attached terminal deoxyabasic moeity
  misc_feature (1)..(1): 2'-deoxy
  misc_feature (2)..(2): 2'-deoxy-2'-fluoro
  misc_feature (3)..(4): 2'-deoxy
  misc_feature (5)..(5): 2'-deoxy-2'-fluoro
  misc_feature (6)..(6): 2'-deoxy
  misc_feature (7)..(7): 2'-deoxy-2'-fluoro
  misc_feature (8)..(16): 2'-deoxy
  misc_feature (17)..(17): 2'-deoxy-2'-fluoro
  misc_feature (18)..(19): 2'-deoxy
  misc_feature (1)..(19): RNA
  misc_feature (21)..(21): 3'-3 attached terminal deoxyabasic moeity
acaacaugaaaagggaugatt

SEQ ID NO: 1539 - DNA, 21 bp, Artificial Sequence
  Synthetic
  misc_feature (1)..(1): 5'-3 attached terminal deoxyabasic moeity
  misc_feature (1)..(4): 2'-deoxy
  misc_feature (5)..(5): 2'-deoxy-2'-fluoro
  misc_feature (6)..(10): 2'-deoxy
  misc_feature (11)..(15): 2'-deoxy-2'-fluoro
  misc_feature (16)..(16): 2'-deoxy
  misc_feature (17)..(17): 2'-deoxy-2'-fluoro
  misc_feature (18)..(19): 2'-deoxy
  misc_feature (1)..(19): RNA
  misc_feature (21)..(21): 3'-3 attached terminal deoxyabasic moeity
gggaugaagauccucacaatt

SEQ ID NO: 1540 - DNA, 21 bp, Artificial Sequence
  Synthetic
  misc_feature (1)..(1): 5'-3 attached terminal deoxyabasic moeity
  misc_feature (1)..(6): 2'-deoxy
  misc_feature (7)..(8): 2'-deoxy-2'-fluoro
  misc_feature (9)..(10): 2'-deoxy
  misc_feature (11)..(11): 2'-deoxy-2'-fluoro
  misc_feature (12)..(17): 2'-deoxy
  misc_feature (18)..(19): 2'-deoxy-2'-fluoro
  misc_feature (1)..(19): RNA
  misc_feature (21)..(21): 3'-3 attached terminal deoxyabasic moeity
gggaaaucgaugagaaauutt

SEQ ID NO: 1541 - DNA, 21 bp, Artificial Sequence
  Synthetic
  misc_feature (1)..(1): 5'-3 attached terminal deoxyabasic moeity
  misc_feature (1)..(5): 2'-deoxy
  misc_feature (6)..(7): 2'-deoxy-2'-fluoro
  misc_feature (8)..(9): 2'-deoxy
  misc_feature (10)..(10): 2'-deoxy-2'-fluoro
  misc_feature (11)..(16): 2'-deoxy
  misc_feature (17)..(18): 2'-deoxy-2'-fluoro
  misc_feature (19)..(19): 2'-deoxy
  misc_feature (1)..(19): RNA
  misc_feature (21)..(21): 3'-3 attached terminal deoxyabasic moeity
ggaaaucgaugagaaauugtt

SEQ ID NO: 1542 - DNA, 21 bp, Artificial Sequence
  Synthetic
  misc_feature (1)..(1): 5'-3 attached terminal deoxyabasic moeity
  misc_feature (1)..(1): 2'-deoxy
  misc_feature (2)..(3): 2'-deoxy-2'-fluoro
  misc_feature (4)..(4): 2'-deoxy
  misc_feature (5)..(7): 2'-deoxy-2'-fluoro
  misc_feature (8)..(12): 2'-deoxy
  misc_feature (13)..(13): 2'-deoxy-2'-fluoro
  misc_feature (14)..(14): 2'-deoxy
  misc_feature (15)..(17): 2'-deoxy-2'-fluoro
  misc_feature (18)..(18): 2'-deoxy
  misc_feature (19)..(19): 2'-deoxy-2'-fluoro
  misc_feature (1)..(19): RNA
  misc_feature (21)..(21): 3'-3 attached terminal deoxyabasic moeity
auugccuagaggugcucautt

SEQ ID NO: 1543 - DNA, 21 bp, Artificial Sequence
  Synthetic
  misc_feature (1)..(1): 2'-deoxy
  misc_feature (2)..(4): 2'-deoxy-2'-fluoro
  misc_feature (5)..(5): 2'-deoxy
  misc_feature (6)..(6): 2'-deoxy-2'-fluoro
  misc_feature (7)..(9): 2'-deoxy
  misc_feature (10)..(12): 2'-deoxy-2'-fluoro
  misc_feature (13)..(14): 2'-deoxy
  misc_feature (15)..(15): 2'-deoxy-2'-fluoro
  misc_feature (16)..(16): 2'-deoxy
  misc_feature (17)..(17): 2'-deoxy-2'-fluoro
  misc_feature (18)..(18): 2'-deoxy
  misc_feature (19)..(19): 2'-deoxy-2'-fluoro
  misc_feature (20)..(20): Phosphorothioate 3'-Internucleotide Linkage
  misc_feature (1)..(19): RNA
gcccacagguccaguguautt

SEQ ID NO: 1544 - DNA, 21 bp, Artificial Sequence
  Synthetic
  misc_feature (1)..(1): 2'-deoxy
  misc_feature (2)..(2): 2'-deoxy-2'-fluoro
  misc_feature (3)..(5): 2'-deoxy
  misc_feature (6)..(7): 2'-deoxy-2'-fluoro
  misc_feature (8)..(8): 2'-deoxy
  misc_feature (9)..(10): 2'-deoxy-2'-fluoro
  misc_feature (11)..(13): 2'-deoxy
  misc_feature (14)..(19): 2'-deoxy-2'-fluoro
  misc_feature (20)..(20): Phosphorothioate 3'-Internucleotide Linkage
  misc_feature (1)..(19): RNA
gugaacugucagguuuccutt

SEQ ID NO: 1545 - DNA, 21 bp, Artificial Sequence
  Synthetic
  misc_feature (1)..(1): 2'-deoxy-2'-fluoro
  misc_feature (2)..(2): 2'-deoxy
  misc_feature (3)..(11): 2'-deoxy-2'-fluoro
  misc_feature (12)..(12): 2'-deoxy
  misc_feature (13)..(13): 2'-deoxy-2'-fluoro
  misc_feature (14)..(14): 2'-deoxy
  misc_feature (15)..(16): 2'-deoxy-2'-fluoro
  misc_feature (17)..(17): 2'-deoxy
  misc_feature (18)..(18): 2'-deoxy-2'-fluoro
  misc_feature (19)..(19): 2'-deoxy
  misc_feature (20)..(20): Phosphorothioate 3'-Internucleotide Linkage
  misc_feature (1)..(19): RNA
caucccuuuucauguugugtt

SEQ ID NO: 1546 - DNA, 21 bp, Artificial Sequence
  Synthetic
  misc_feature (1)..(2): 2'-deoxy-2'-fluoro
  misc_feature (3)..(3): 2'-deoxy
  misc_feature (4)..(12): 2'-deoxy-2'-fluoro
  misc_feature (13)..(13): 2'-deoxy
  misc_feature (14)..(14): 2'-deoxy-2'-fluoro
  misc_feature (15)..(15): 2'-deoxy
  misc_feature (16)..(17): 2'-deoxy-2'-fluoro
  misc_feature (18)..(18): 2'-deoxy
  misc_feature (19)..(19): 2'-deoxy-2'-fluoro
  misc_feature (20)..(20): Phosphorothioate 3'-Internucleotide Linkage
  misc_feature (1)..(19): RNA
ucaucccuuuucauguugutt

SEQ ID NO: 1547 - DNA, 21 bp, Artificial Sequence
  Synthetic
  misc_feature (1)..(2): 2'-deoxy-2'-fluoro
  misc_feature (3)..(3): 2'-deoxy
  misc_feature (4)..(4): 2'-deoxy-2'-fluoro
  misc_feature (5)..(9): 2'-deoxy
  misc_feature (10)..(14): 2'-deoxy-2'-fluoro
  misc_feature (15)..(15): 2'-deoxy
  misc_feature (16)..(19): 2'-deoxy-2'-fluoro
  misc_feature (20)..(20): Phosphorothioate 3'-Internucleotide Linkage
  misc_feature (1)..(19): RNA
uugugaggaucuucauccctt

SEQ ID NO: 1548 - DNA, 21 bp, Artificial Sequence
  Synthetic
  misc_feature (1)..(2): 2'-deoxy
  misc_feature (3)..(8): 2'-deoxy-2'-fluoro
  misc_feature (9)..(9): 2'-deoxy
  misc_feature (10)..(11): 2'-deoxy-2'-fluoro
  misc_feature (12)..(13): 2'-deoxy
  misc_feature (14)..(19): 2'-deoxy-2'-fluoro
  misc_feature (20)..(20): Phosphorothioate 3'-Internucleotide Linkage
  misc_feature (1)..(19): RNA
aauuucucaucgauuuccctt

SEQ ID NO: 1549 - DNA, 21 bp, Artificial Sequence
  Synthetic
  misc_feature (1)..(1): 2'-deoxy-2'-fluoro
  misc_feature (2)..(3): 2'-deoxy
  misc_feature (4)..(9): 2'-deoxy-2'-fluoro
  misc_feature (10)..(10): 2'-deoxy
  misc_feature (11)..(12): 2'-deoxy-2'-fluoro
  misc_feature (13)..(14): 2'-deoxy
  misc_feature (15)..(19): 2'-deoxy-2'-fluoro
  misc_feature (20)..(20): Phosphorothioate 3'-Internucleotide Linkage
  misc_feature (1)..(19): RNA
caauuucucaucgauuucctt

SEQ ID NO: 1550 - DNA, 21 bp, Artificial Sequence
  Synthetic
  misc_feature (1)..(1): 2'-deoxy
  misc_feature (2)..(2): 2'-deoxy-2'-fluoro
  misc_feature (3)..(5): 2'-deoxy
  misc_feature (6)..(6): 2'-deoxy-2'-fluoro
  misc_feature (7)..(7): 2'-deoxy
  misc_feature (8)..(12): 2'-deoxy-2'-fluoro
  misc_feature (13)..(15): 2'-deoxy
  misc_feature (16)..(16): 2'-deoxy-2'-fluoro
  misc_feature (17)..(18): 2'-deoxy
  misc_feature (19)..(19): 2'-deoxy-2'-fluoro
  misc_feature (20)..(20): Phosphorothioate 3'-Internucleotide Linkage
  misc_feature (1)..(19): RNA
augagcaccucuaggcaautt

SEQ ID NO: 1551 - DNA, 21 bp, Artificial Sequence
  Synthetic
  misc_feature (1)..(1): 5'-3 attached terminal deoxyabasic moeity
  misc_feature (1)..(1): 2'-O-methyl
  misc_feature (2)..(2): 2'-deoxy-2'-fluoro
  misc_feature (3)..(3): 2'-O-methyl
  misc_feature (4)..(4): 2'-deoxy-2'-fluoro
  misc_feature (5)..(5): 2'-O-methyl
  misc_feature (6)..(7): 2'-deoxy-2'-fluoro
  misc_feature (8)..(10): 2'-O-methyl
  misc_feature (11)..(13): 2'-deoxy-2'-fluoro
  misc_feature (14)..(14): 2'-O-methyl
  misc_feature (15)..(15): 2'-deoxy-2'-fluoro
  misc_feature (16)..(18): 2'-O-methyl
  misc_feature (19)..(19): 2'-deoxy-2'-fluoro
  misc_feature (1)..(19): RNA
  misc_feature (21)..(21): 3'-3 attached terminal deoxyabasic moeity
auacacuggaccugugggctt

SEQ ID NO: 1552 - DNA, 21 bp, Artificial Sequence
  Synthetic
  misc_feature (1)..(1): 5'-3 attached terminal deoxyabasic moeity
  misc_feature (2)..(6): 2'-O-methyl
  misc_feature (7)..(9): 2'-deoxy-2'-fluoro
  misc_feature (10)..(11): 2'-O-methyl
  misc_feature (12)..(12): 2'-deoxy-2'-fluoro
  misc_feature (13)..(14): 2'-O-methyl
  misc_feature (15)..(17): 2'-deoxy-2'-fluoro
  misc_feature (16)..(18): 2'-O-methyl
  misc_feature (19)..(19): 2'-deoxy-2'-fluoro
  misc_feature (1)..(19): RNA
  misc_feature (21)..(21): 3'-3 attached terminal deoxyabasic moeity
aggaaaccugacaguucactt

SEQ ID NO: 1553 - DNA, 21 bp, Artificial Sequence
  Synthetic
  misc_feature (1)..(1): 5'-3 attached terminal deoxyabasic moeity
  misc_feature (1)..(1): 2'-deoxy-2'-fluoro
  misc_feature (2)..(2): 2'-O-methyl
  misc_feature (3)..(3): 2'-deoxy-2'-fluoro
  misc_feature (4)..(5): 2'-O-methyl
  misc_feature (6)..(6): 2'-deoxy-2'-fluoro
  misc_feature (7)..(7): 2'-O-methyl
  misc_feature (8)..(8): 2'-deoxy-2'-fluoro
  misc_feature (9)..(17): 2'-O-methyl
  misc_feature (18)..(18): 2'-deoxy-2'-fluoro
  misc_feature (1)..(19): RNA
  misc_feature (21)..(21): 3'-3 attached terminal deoxyabasic moeity
cacaacaugaaaagggaugtt

SEQ ID NO: 1554 - DNA, 21 bp, Artificial Sequence
  Synthetic
  misc_feature (1)..(1): 5'-3 attached terminal deoxyabasic moeity
  misc_feature (1)..(1): 2'-O-methyl
  misc_feature (2)..(2): 2'-deoxy-2'-fluoro
  misc_feature (3)..(4): 2'-O-methyl
  misc_feature (5)..(5): 2'-deoxy-2'-fluoro
  misc_feature (6)..(6): 2'-O-methyl
  misc_feature (7)..(7): 2'-deoxy-2'-fluoro
  misc_feature (8)..(16): 2'-O-methyl
  misc_feature (17)..(17): 2'-deoxy-2'-fluoro
  misc_feature (18)..(19): 2'-O-methyl
  misc_feature (1)..(19): RNA
  misc_feature (21)..(21): 3'-3 attached terminal deoxyabasic moeity
acaacaugaaaagggaugatt

SEQ ID NO: 1555 - DNA, 21 bp, Artificial Sequence
  Synthetic
  misc_feature (1)..(1): 5'-3 attached terminal deoxyabasic moeity
  misc_feature (1)..(4): 2'-O-methyl
  misc_feature (5)..(5): 2'-deoxy-2'-fluoro
  misc_feature (6)..(10): 2'-O-methyl
  misc_feature (11)..(15): 2'-deoxy-2'-fluoro
  misc_feature (16)..(16): 2'-O-methyl
  misc_feature (17)..(17): 2'-deoxy-2'-fluoro
  misc_feature (18)..(19): 2'-O-methyl
  misc_feature (1)..(19): RNA
  misc_feature (21)..(21): 3'-3 attached terminal deoxyabasic moeity
gggaugaagauccucacaatt

SEQ ID NO: 1556 - DNA, 21 bp, Artificial Sequence
  Synthetic
  misc_feature (1)..(1): 5'-3 attached terminal deoxyabasic moeity
  misc_feature (1)..(6): 2'-O-methyl
  misc_feature (7)..(8): 2'-deoxy-2'-fluoro
  misc_feature (9)..(10): 2'-O-methyl
  misc_feature (11)..(11): 2'-deoxy-2'-fluoro
  misc_feature (12)..(17): 2'-O-methyl
  misc_feature (18)..(19): 2'-deoxy-2'-fluoro
  misc_feature (1)..(19): RNA
  misc_feature (21)..(21): 3'-3 attached terminal deoxyabasic moeity
gggaaaucgaugagaaauutt

SEQ ID NO: 1557 - DNA, 21 bp, Artificial Sequence
  Synthetic
  misc_feature (1)..(1): 5'-3 attached terminal deoxyabasic moeity
  misc_feature (1)..(5): 2'-O-methyl
  misc_feature (6)..(7): 2'-deoxy-2'-fluoro
  misc_feature (8)..(9): 2'-O-methyl
  misc_feature (10)..(10): 2'-deoxy-2'-fluoro
  misc_feature (11)..(16): 2'-O-methyl
  misc_feature (17)..(18): 2'-deoxy-2'-fluoro
  misc_feature (19)..(19): 2'-O-methyl
  misc_feature (1)..(19): RNA
  misc_feature (21)..(21): 3'-3 attached terminal deoxyabasic moeity
ggaaaucgaugagaaauugtt

SEQ ID NO: 1558 - DNA, 21 bp, Artificial Sequence
  Synthetic
  misc_feature (1)..(1): 5'-3 attached terminal deoxyabasic moeity
  misc_feature (1)..(1): 2'-O-methyl
  misc_feature (2)..(3): 2'-deoxy-2'-fluoro
  misc_feature (4)..(4): 2'-O-methyl
  misc_feature (5)..(7): 2'-deoxy-2'-fluoro
  misc_feature (8)..(12): 2'-O-methyl
  misc_feature (13)..(13): 2'-deoxy-2'-fluoro
  misc_feature (14)..(14): 2'-O-methyl
  misc_feature (15)..(17): 2'-deoxy-2'-fluoro
  misc_feature (16)..(18): 2'-O-methyl
  misc_feature (19)..(19): 2'-deoxy-2'-fluoro
  misc_feature (1)..(19): RNA
  misc_feature (21)..(21): 3'-3 attached terminal deoxyabasic moeity
auugccuagaggugcucautt

SEQ ID NO: 1559 - DNA, 21 bp, Artificial Sequence
  Synthetic
  misc_feature (1)..(1): 2'-O-methyl
  misc_feature (2)..(4): 2'-deoxy-2'-fluoro
  misc_feature (5)..(5): 2'-O-methyl
  misc_feature (6)..(6): 2'-deoxy-2'-fluoro
  misc_feature (7)..(9): 2'-O-methyl
  misc_feature (10)..(12): 2'-deoxy-2'-fluoro
  misc_feature (13)..(14): 2'-O-methyl
  misc_feature (15)..(15): 2'-deoxy-2'-fluoro
  misc_feature (16)..(16): 2'-O-methyl
  misc_feature (17)..(17): 2'-deoxy-2'-fluoro
  misc_feature (18)..(18): 2'-O-methyl
  misc_feature (19)..(19): 2'-deoxy-2'-fluoro
  misc_feature (20)..(20): Phosphorothioate 3'-Internucleotide Linkage
  misc_feature (1)..(19): RNA
gcccacagguccaguguautt

SEQ ID NO: 1560 - DNA, 21 bp, Artificial Sequence
  Synthetic
  misc_feature (1)..(1): 2'-O-methyl
  misc_feature (2)..(2): 2'-deoxy-2'-fluoro
  misc_feature (3)..(5): 2'-O-methyl
  misc_feature (6)..(7): 2'-deoxy-2'-fluoro
  misc_feature (8)..(8): 2'-O-methyl
  misc_feature (9)..(10): 2'-deoxy-2'-fluoro
  misc_feature (11)..(13): 2'-O-methyl
  misc_feature (14)..(19): 2'-deoxy-2'-fluoro
  misc_feature (20)..(20): Phosphorothioate 3'-Internucleotide Linkage
  misc_feature (1)..(19): RNA
gugaacugucagguuuccutt

SEQ ID NO: 1561 - DNA, 21 bp, Artificial Sequence
  Synthetic
  misc_feature (1)..(1): 2'-deoxy-2'-fluoro
  misc_feature (2)..(2): 2'-O-methyl
  misc_feature (3)..(11): 2'-deoxy-2'-fluoro
  misc_feature (12)..(12): 2'-O-methyl
  misc_feature (13)..(13): 2'-deoxy-2'-fluoro
  misc_feature (14)..(14): 2'-O-methyl
  misc_feature (15)..(16): 2'-deoxy-2'-fluoro
  misc_feature (17)..(17): 2'-O-methyl
  misc_feature (18)..(18): 2'-deoxy-2'-fluoro
  misc_feature (19)..(19): 2'-O-methyl
  misc_feature (20)..(20): Phosphorothioate 3'-Internucleotide Linkage
  misc_feature (1)..(19): RNA
caucccuuuucauguugugtt

SEQ ID NO: 1562 - DNA, 21 bp, Artificial Sequence
  Synthetic
  misc_feature (1)..(2): 2'-deoxy-2'-fluoro
  misc_feature (3)..(3): 2'-O-methyl
  misc_feature (4)..(12): 2'-deoxy-2'-fluoro
  misc_feature (13)..(13): 2'-O-methyl
  misc_feature (14)..(14): 2'-deoxy-2'-fluoro
  misc_feature (15)..(15): 2'-O-methyl
  misc_feature (16)..(17): 2'-deoxy-2'-fluoro
  misc_feature (18)..(18): 2'-O-methyl
  misc_feature (19)..(19): 2'-deoxy-2'-fluoro
  misc_feature (20)..(20): Phosphorothioate 3'-Internucleotide Linkage
  misc_feature (1)..(19): RNA
ucaucccuuuucauguugutt

SEQ ID NO: 1563 - DNA, 21 bp, Artificial Sequence
  Synthetic
  misc_feature (1)..(2): 2'-deoxy-2'-fluoro
  misc_feature (3)..(3): 2'-O-methyl
  misc_feature (4)..(4): 2'-deoxy-2'-fluoro
  misc_feature (5)..(9): 2'-O-methyl
  misc_feature (10)..(14): 2'-deoxy-2'-fluoro
  misc_feature (15)..(15): 2'-O-methyl
  misc_feature (16)..(19): 2'-deoxy-2'-fluoro
  misc_feature (20)..(20): Phosphorothioate 3'-Internucleotide Linkage
  misc_feature (1)..(19): RNA
uugugaggaucuucauccctt

SEQ ID NO: 1564 - DNA, 21 bp, Artificial Sequence
  Synthetic
  misc_feature (1)..(2): 2'-O-methyl
  misc_feature (3)..(8): 2'-deoxy-2'-fluoro
  misc_feature (9)..(9): 2'-O-methyl
  misc_feature (10)..(11): 2'-deoxy-2'-fluoro
  misc_feature (12)..(13): 2'-O-methyl
  misc_feature (14)..(19): 2'-deoxy-2'-fluoro
  misc_feature (20)..(20): Phosphorothioate 3'-Internucleotide Linkage
  misc_feature (1)..(19): RNA
aauuucucaucgauuuccctt

SEQ ID NO: 1565 - DNA, 21 bp, Artificial Sequence
  Synthetic
  misc_feature (1)..(1): 2'-deoxy-2'-fluoro
  misc_feature (2)..(3): 2'-O-methyl
  misc_feature (4)..(9): 2'-deoxy-2'-fluoro
  misc_feature (10)..(10): 2'-O-methyl
  misc_feature (11)..(12): 2'-deoxy-2'-fluoro
  misc_feature (13)..(14): 2'-O-methyl
  misc_feature (15)..(19): 2'-deoxy-2'-fluoro
  misc_feature (20)..(20): Phosphorothioate 3'-Internucleotide Linkage
  misc_feature (1)..(19): RNA
caauuucucaucgauuucctt

SEQ ID NO: 1566 - DNA, 21 bp, Artificial Sequence
  Synthetic
  misc_feature (1)..(1): 2'-O-methyl
  misc_feature (2)..(2): 2'-deoxy-2'-fluoro
  misc_feature (3)..(5): 2'-O-methyl
  misc_feature (6)..(6): 2'-deoxy-2'-fluoro
  misc_feature (7)..(7): 2'-O-methyl
  misc_feature (8)..(12): 2'-deoxy-2'-fluoro
  misc_feature (13)..(15): 2'-O-methyl
  misc_feature (16)..(16): 2'-deoxy-2'-fluoro
  misc_feature (17)..(18): 2'-O-methyl
  misc_feature (19)..(19): 2'-deoxy-2'-fluoro
  misc_feature (20)..(20): Phosphorothioate 3'-Internucleotide Linkage
  misc_feature (1)..(19): RNA
augagcaccucuaggcaautt

SEQ ID NO: 1567 - DNA, 21 bp, Artificial Sequence
  Synthetic
  misc_feature (1)..(1): 5'-3 attached terminal deoxyabasic moeity
  misc_feature (1)..(19): RNA
  misc_feature (21)..(21): 3'-3 attached terminal deoxyabasic moeity
auacacuggaccugugggctt

SEQ ID NO: 1568 - DNA, 21 bp, Artificial Sequence
  Synthetic
  misc_feature (1)..(1): 5'-3 attached terminal deoxyabasic moeity
  misc_feature (1)..(19): RNA
  misc_feature (21)..(21): 3'-3 attached terminal deoxyabasic moeity
aggaaaccugacaguucactt

SEQ ID NO: 1569 - DNA, 21 bp, Artificial Sequence
  Synthetic
  misc_feature (1)..(1): 5'-3 attached terminal deoxyabasic moeity
  misc_feature (1)..(19): RNA
  misc_feature (21)..(21): 3'-3 attached terminal deoxyabasic moeity
cacaacaugaaaagggaugtt

SEQ ID NO: 1570 - DNA, 21 bp, Artificial Sequence
  Synthetic
  misc_feature (1)..(1): 5'-3 attached terminal deoxyabasic moeity
  misc_feature (1)..(19): RNA
  misc_feature (21)..(21): 3'-3 attached terminal deoxyabasic moeity
acaacaugaaaagggaugatt

SEQ ID NO: 1571 - DNA, 21 bp, Artificial Sequence
  Synthetic
  misc_feature (1)..(1): 5'-3 attached terminal deoxyabasic moeity
  misc_feature (1)..(19): RNA
  misc_feature (21)..(21): 3'-3 attached terminal deoxyabasic moeity
gggaugaagauccucacaatt

SEQ ID NO: 1572 - DNA, 21 bp, Artificial Sequence
  Synthetic
  misc_feature (1)..(1): 5'-3 attached terminal deoxyabasic moeity
  misc_feature (1)..(19): RNA
  misc_feature (21)..(21): 3'-3 attached terminal deoxyabasic moeity
gggaaaucgaugagaaauutt

SEQ ID NO: 1573 - DNA, 21 bp, Artificial Sequence
  Synthetic
  misc_feature (1)..(1): 5'-3 attached terminal deoxyabasic moeity
  misc_feature (1)..(19): RNA
  misc_feature (21)..(21): 3'-3 attached terminal deoxyabasic moeity
ggaaaucgaugagaaauugtt

SEQ ID NO: 1574 - DNA, 21 bp, Artificial Sequence
  Synthetic
  misc_feature (1)..(1): 5'-3 attached terminal deoxyabasic moeity
  misc_feature (1)..(19): RNA
  misc_feature (21)..(21): 3'-3 attached terminal deoxyabasic moeity
auugccuagaggugcucautt

SEQ ID NO: 1575 - DNA, 21 bp, Artificial Sequence
  Synthetic
  misc_feature (20)..(20): Phosphorothioate 3'-Internucleotide Linkage
  misc_feature (1)..(19): RNA
gcccacagguccaguguautt

SEQ ID NO: 1576 - DNA, 21 bp, Artificial Sequence
  Synthetic
  misc_feature (20)..(20): Phosphorothioate 3'-Internucleotide Linkage
  misc_feature (1)..(19): RNA
gugaacugucagguuuccutt

SEQ ID NO: 1577 - DNA, 21 bp, Artificial Sequence
  Synthetic
  misc_feature (20)..(20): Phosphorothioate 3'-Internucleotide Linkage
  misc_feature (1)..(19): RNA
caucccuuuucauguugugtt

SEQ ID NO: 1578 - DNA, 21 bp, Artificial Sequence
  Synthetic
  misc_feature (20)..(20): Phosphorothioate 3'-Internucleotide Linkage
  misc_feature (1)..(19): RNA
ucaucccuuuucauguugutt

SEQ ID NO: 1579 - DNA, 21 bp, Artificial Sequence
  Synthetic
  misc_feature (20)..(20): Phosphorothioate 3'-Internucleotide Linkage
  misc_feature (1)..(19): RNA
uugugaggaucuucauccctt

SEQ ID NO: 1580 - DNA, 21 bp, Artificial Sequence
  Synthetic
  misc_feature (20)..(20): Phosphorothioate 3'-Internucleotide Linkage
  misc_feature (1)..(19): RNA
aauuucucaucgauuuccctt

SEQ ID NO: 1581 - DNA, 21 bp, Artificial Sequence
  Synthetic
  misc_feature (20)..(20): Phosphorothioate 3'-Internucleotide Linkage
  misc_feature (1)..(19): RNA
caauuucucaucgauuucctt

SEQ ID NO: 1582 - DNA, 21 bp, Artificial Sequence
  Synthetic
  misc_feature (20)..(20): Phosphorothioate 3'-Internucleotide Linkage
  misc_feature (1)..(19): RNA
augagcaccucuaggcaautt

SEQ ID NO: 1583 - DNA, 21 bp, Artificial Sequence
  Synthetic
  misc_feature (1)..(19): RNA
  misc_feature (21)..(21): 3'-3 attached terminal deoxyabasic moeity
gcccacagguccaguguautt

SEQ ID NO: 1584 - DNA, 21 bp, Artificial Sequence
  Synthetic
  misc_feature (1)..(19): RNA
  misc_feature (21)..(21): 3'-3 attached terminal deoxyabasic moeity
gugaacugucagguuuccutt

SEQ ID NO: 1585 - DNA, 21 bp, Artificial Sequence
  Synthetic
  misc_feature (1)..(19): RNA
  misc_feature (21)..(21): 3'-3 attached terminal deoxyabasic moeity
caucccuuuucauguugugtt

SEQ ID NO: 1586 - DNA, 21 bp, Artificial Sequence
  Synthetic
  misc_feature (1)..(19): RNA
  misc_feature (21)..(21): 3'-3 attached terminal deoxyabasic moeity
ucaucccuuuucauguugutt

SEQ ID NO: 1587 - DNA, 21 bp, Artificial Sequence
  Synthetic
  misc_feature (1)..(19): RNA
  misc_feature (21)..(21): 3'-3 attached terminal deoxyabasic moeity
uugugaggaucuucauccctt

SEQ ID NO: 1588 - DNA, 21 bp, Artificial Sequence
  Synthetic
  misc_feature (1)..(19): RNA
  misc_feature (21)..(21): 3'-3 attached terminal deoxyabasic moeity
aauuucucaucgauuuccctt

SEQ ID NO: 1589 - DNA, 21 bp, Artificial Sequence
  Synthetic
  misc_feature (1)..(19): RNA
  misc_feature (21)..(21): 3'-3 attached terminal deoxyabasic moeity
caauuucucaucgauuucctt

SEQ ID NO: 1590 - DNA, 21 bp, Artificial Sequence
  Synthetic
  misc_feature (1)..(19): RNA
  misc_feature (21)..(21): 3'-3 attached terminal deoxyabasic moeity
augagcaccucuaggcaautt

SEQ ID NO: 1591 - DNA, 21 bp, Artificial Sequence
  Synthetic
  misc_feature (1)..(19): RNA
  misc_feature (21)..(21): 3'-3 attached terminal deoxyabasic moeity
gcccacagguccaguguautt

SEQ ID NO: 1592 - DNA, 21 bp, Artificial Sequence
  Synthetic
  misc_feature (1)..(19): RNA
  misc_feature (21)..(21): 3'-3 attached terminal deoxyabasic moeity
gugaacugucagguuuccutt

SEQ ID NO: 1593 - DNA, 21 bp, Artificial Sequence
  Synthetic
  misc_feature (1)..(19): RNA
  misc_feature (21)..(21): 3'-3 attached terminal deoxyabasic moeity
caucccuuuucauguugugtt

SEQ ID NO: 1594 - DNA, 21 bp, Artificial Sequence
  Synthetic
  misc_feature (1)..(19): RNA
  misc_feature (21)..(21): 3'-3 attached terminal deoxyabasic moeity
ucaucccuuuucauguugutt

SEQ ID NO: 1595 - DNA, 21 bp, Artificial Sequence
  Synthetic
  misc_feature (1)..(19): RNA
  misc_feature (21)..(21): 3'-3 attached terminal deoxyabasic moeity
uugugaggaucuucauccctt

SEQ ID NO: 1596 - DNA, 21 bp, Artificial Sequence
  Synthetic
  misc_feature (1)..(19): RNA
  misc_feature (21)..(21): 3'-3 attached terminal deoxyabasic moeity
aauuucucaucgauuuccctt

SEQ ID NO: 1597 - DNA, 21 bp, Artificial Sequence
  Synthetic
  misc_feature (1)..(19): RNA
  misc_feature (21)..(21): 3'-3 attached terminal deoxyabasic moeity
caauuucucaucgauuucctt

SEQ ID NO: 1598 - DNA, 21 bp, Artificial Sequence
  Synthetic
  misc_feature (1)..(19): RNA
  misc_feature (21)..(21): 3'-3 attached terminal deoxyabasic moeity
augagcaccucuaggcaautt

SEQ ID NO: 1599 - DNA, 21 bp, Artificial Sequence
  Synthetic
  misc_feature (1)..(19): RNA
caguuuguaaaggaccugctt

SEQ ID NO: 1600 - DNA, 21 bp, Artificial Sequence
  Synthetic
  misc_feature (1)..(19): RNA
cuucacacacaggcaacugtt

SEQ ID NO: 1601 - DNA, 21 bp, Artificial Sequence
  Synthetic
  misc_feature (1)..(19): RNA
aggcacacuucuucuuggutt

SEQ ID NO: 1602 - DNA, 21 bp, Artificial Sequence
  Synthetic
  misc_feature (1)..(19): RNA
gacuguggcugcuagcacutt

SEQ ID NO: 1603 - DNA, 21 bp, Artificial Sequence
  Synthetic
  misc_feature (1)..(19): RNA
cacuaaagcaguggacacctt

SEQ ID NO: 1604 - DNA, 21 bp, Artificial Sequence
  Synthetic
  misc_feature (1)..(19): RNA
cuaaagcaguggacaccagtt

SEQ ID NO: 1605 - DNA, 21 bp, Artificial Sequence
  Synthetic
  misc_feature (1)..(19): RNA
aagcaguggacaccaggagtt

SEQ ID NO: 1606 - DNA, 21 bp, Artificial Sequence
  Synthetic
  misc_feature (1)..(19): RNA
aaggguaccuugaacacugtt

SEQ ID NO: 1607 - DNA, 21 bp, Artificial Sequence
  Synthetic
  misc_feature (1)..(19): RNA
gcagguccuuuacaaacugtt

SEQ ID NO: 1608 - DNA, 21 bp, Artificial Sequence
  Synthetic
  misc_feature (1)..(19): RNA
caguugccugugugugaagtt

SEQ ID NO: 1609 - DNA, 21 bp, Artificial Sequence
  Synthetic
  misc_feature (1)..(19): RNA
accaagaagaagugugccutt

SEQ ID NO: 1610 - DNA, 21 bp, Artificial Sequence
  Synthetic
  misc_feature (1)..(19): RNA
agugcuagcagccacaguctt

SEQ ID NO: 1611 - DNA, 21 bp, Artificial Sequence
  Synthetic
  misc_feature (1)..(19): RNA
gguguccacugcuuuagugtt

SEQ ID NO: 1612 - DNA, 21 bp, Artificial Sequence
  Synthetic
  misc_feature (1)..(19): RNA
cugguguccacugcuuuagtt

SEQ ID NO: 1613 - DNA, 21 bp, Artificial Sequence
  Synthetic
  misc_feature (1)..(19): RNA
cuccugguguccacugcuutt

SEQ ID NO: 1614 - DNA, 21 bp, Artificial Sequence
  Synthetic
  misc_feature (1)..(19): RNA
caguguucaagguacccuutt

SEQ ID NO: 1615 - DNA, 21 bp, Artificial Sequence
  Synthetic
  misc_feature (1)..(1): 5'-3 attached terminal deoxyabasic moeity
  misc_feature (1)..(19): RNA
  misc_feature (21)..(21): 3'-3 attached terminal deoxyabasic moeity
caguuuguaaaggaccugctt

SEQ ID NO: 1616 - DNA, 21 bp, Artificial Sequence
  Synthetic
  misc_feature (1)..(1): 5'-3 attached terminal deoxyabasic moeity
  misc_feature (1)..(19): RNA
  misc_feature (21)..(21): 3'-3 attached terminal deoxyabasic moeity
cuucacacacaggcaacugtt

SEQ ID NO: 1617 - DNA, 21 bp, Artificial Sequence
  Synthetic
  misc_feature (1)..(1): 5'-3 attached terminal deoxyabasic moeity
  misc_feature (1)..(19): RNA
  misc_feature (21)..(21): 3'-3 attached terminal deoxyabasic moeity
aggcacacuucuucuuggutt

SEQ ID NO: 1618 - DNA, 21 bp, Artificial Sequence
  Synthetic
  misc_feature (1)..(1): 5'-3 attached terminal deoxyabasic moeity
  misc_feature (1)..(19): RNA
  misc_feature (21)..(21): 3'-3 attached terminal deoxyabasic moeity
gacuguggcugcuagcacutt

SEQ ID NO: 1619 - DNA, 21 bp, Artificial Sequence
  Synthetic
  misc_feature (1)..(1): 5'-3 attached terminal deoxyabasic moeity
  misc_feature (1)..(19): RNA
  misc_feature (21)..(21): 3'-3 attached terminal deoxyabasic moeity
cacuaaagcaguggacacctt

SEQ ID NO: 1620 - DNA, 21 bp, Artificial Sequence
  Synthetic
  misc_feature (1)..(1): 5'-3 attached terminal deoxyabasic moeity
  misc_feature (1)..(19): RNA
  misc_feature (21)..(21): 3'-3 attached terminal deoxyabasic moeity
cuaaagcaguggacaccagtt

SEQ ID NO: 1621 - DNA, 21 bp, Artificial Sequence
  Synthetic
  misc_feature (1)..(1): 5'-3 attached terminal deoxyabasic moeity
  misc_feature (1)..(19): RNA
  misc_feature (21)..(21): 3'-3 attached terminal deoxyabasic moeity
aagcaguggacaccaggagtt

SEQ ID NO: 1622 - DNA, 21 bp, Artificial Sequence
  Synthetic
  misc_feature (1)..(1): 5'-3 attached terminal deoxyabasic moeity
  misc_feature (1)..(19): RNA
  misc_feature (21)..(21): 3'-3 attached terminal deoxyabasic moeity
aaggguaccuugaacacugtt

SEQ ID NO: 1623 - DNA, 21 bp, Artificial Sequence
  Synthetic
  misc_feature (20)..(20): Phosphorothioate 3'-Internucleotide Linkage
  misc_feature (1)..(19): RNA
gcagguccuuuacaaacugtt

SEQ ID NO: 1624 - DNA, 21 bp, Artificial Sequence
  Synthetic
  misc_feature (20)..(20): Phosphorothioate 3'-Internucleotide Linkage
  misc_feature (1)..(19): RNA
caguugccugugugugaagtt

SEQ ID NO: 1625 - DNA, 21 bp, Artificial Sequence
  Synthetic
  misc_feature (20)..(20): Phosphorothioate 3'-Internucleotide Linkage
  misc_feature (1)..(19): RNA
accaagaagaagugugccutt

SEQ ID NO: 1626 - DNA, 21 bp, Artificial Sequence
  Synthetic
  misc_feature (20)..(20): Phosphorothioate 3'-Internucleotide Linkage
  misc_feature (1)..(19): RNA
agugcuagcagccacaguctt

SEQ ID NO: 1627 - DNA, 21 bp, Artificial Sequence
  Synthetic
  misc_feature (20)..(20): Phosphorothioate 3'-Internucleotide Linkage
  misc_feature (1)..(19): RNA
gguguccacugcuuuagugtt

SEQ ID NO: 1628 - DNA, 21 bp, Artificial Sequence
  Synthetic
  misc_feature (20)..(20): Phosphorothioate 3'-Internucleotide Linkage
  misc_feature (1)..(19): RNA
cugguguccacugcuuuagtt

SEQ ID NO: 1629 - DNA, 21 bp, Artificial Sequence
  Synthetic
  misc_feature (20)..(20): Phosphorothioate 3'-Internucleotide Linkage
  misc_feature (1)..(19): RNA
cuccugguguccacugcuutt

SEQ ID NO: 1630 - DNA, 21 bp, Artificial Sequence
  Synthetic
  misc_feature (20)..(20): Phosphorothioate 3'-Internucleotide Linkage
  misc_feature (1)..(19): RNA
caguguucaagguacccuutt

SEQ ID NO: 1631 - DNA, 21 bp, Artificial Sequence
  Synthetic
  misc_feature (1)..(1): 5'-3 attached terminal deoxyabasic moeity
  misc_feature (1)..(19): RNA
  misc_feature (21)..(21): 3'-3 attached terminal deoxyabasic moeity
uuguguguuauuuaaaugatt

SEQ ID NO: 1632 - DNA, 21 bp, Artificial Sequence
  Synthetic
  misc_feature (1)..(1): 5'-3 attached terminal deoxyabasic moeity
  misc_feature (1)..(19): RNA
  misc_feature (21)..(21): 3'-3 attached terminal deoxyabasic moeity
uguguguuauuuaaaugagtt

SEQ ID NO: 1633 - DNA, 21 bp, Artificial Sequence
  Synthetic
  misc_feature (1)..(1): 5'-3 attached terminal deoxyabasic moeity
  misc_feature (1)..(19): RNA
  misc_feature (21)..(21): 3'-3 attached terminal deoxyabasic moeity
guguguuauuuaaaugagutt

SEQ ID NO: 1634 - DNA, 21 bp, Artificial Sequence
  Synthetic
  misc_feature (1)..(1): 5'-3 attached terminal deoxyabasic moeity
  misc_feature (1)..(19): RNA
  misc_feature (21)..(21): 3'-3 attached terminal deoxyabasic moeity
auuguguguuauuuaaaugtt

SEQ ID NO: 1635 - DNA, 21 bp, Artificial Sequence
  Synthetic
  misc_feature (1)..(1): 5'-3 attached terminal deoxyabasic moeity
  misc_feature (1)..(19): RNA
  misc_feature (21)..(21): 3'-3 attached terminal deoxyabasic moeity
caauggcagcaugguauggtt

SEQ ID NO: 1636 - DNA, 21 bp, Artificial Sequence
  Synthetic
  misc_feature (1)..(1): 5'-3 attached terminal deoxyabasic moeity
  misc_feature (1)..(19): RNA
  misc_feature (21)..(21): 3'-3 attached terminal deoxyabasic moeity
aauggcagcaugguauggatt

SEQ ID NO: 1637 - DNA, 21 bp, Artificial Sequence
  Synthetic
  misc_feature (1)..(1): 5'-3 attached terminal deoxyabasic moeity
  misc_feature (1)..(19): RNA
  misc_feature (21)..(21): 3'-3 attached terminal deoxyabasic moeity
auggcagcaugguauggagtt

SEQ ID NO: 1638 - DNA, 21 bp, Artificial Sequence
  Synthetic
  misc_feature (1)..(1): 5'-3 attached terminal deoxyabasic moeity
  misc_feature (1)..(19): RNA
  misc_feature (21)..(21): 3'-3 attached terminal deoxyabasic moeity
auuauuguguguuauuuaatt

SEQ ID NO: 1639 - DNA, 21 bp, Artificial Sequence
  Synthetic
  misc_feature (1)..(1): 5'-3 attached terminal deoxyabasic moeity
  misc_feature (1)..(19): RNA
  misc_feature (21)..(21): 3'-3 attached terminal deoxyabasic moeity
uuauuguguguuauuuaaatt

SEQ ID NO: 1640 - DNA, 21 bp, Artificial Sequence
  Synthetic
  misc_feature (1)..(1): 5'-3 attached terminal deoxyabasic moeity
  misc_feature (1)..(19): RNA
  misc_feature (21)..(21): 3'-3 attached terminal deoxyabasic moeity
uauuguguguuauuuaaautt

SEQ ID NO: 1641 - DNA, 21 bp, Artificial Sequence
  Synthetic
  misc_feature (1)..(1): 5'-3 attached terminal deoxyabasic moeity
  misc_feature (1)..(19): RNA
  misc_feature (21)..(21): 3'-3 attached terminal deoxyabasic moeity
caguuuguaaaggaccugctt

SEQ ID NO: 1642 - DNA, 21 bp, Artificial Sequence
  Synthetic
  misc_feature (1)..(1): 5'-3 attached terminal deoxyabasic moeity
  misc_feature (1)..(19): RNA
  misc_feature (21)..(21): 3'-3 attached terminal deoxyabasic moeity
cuucacacacaggcaacugtt

SEQ ID NO: 1643 - DNA, 21 bp, Artificial Sequence
  Synthetic
  misc_feature (1)..(1): 5'-3 attached terminal deoxyabasic moeity
  misc_feature (1)..(19): RNA
  misc_feature (21)..(21): 3'-3 attached terminal deoxyabasic moeity
aggcacacuucuucuuggutt

SEQ ID NO: 1644 - DNA, 21 bp, Artificial Sequence
  Synthetic
  misc_feature (1)..(1): 5'-3 attached terminal deoxyabasic moeity
  misc_feature (1)..(19): RNA
  misc_feature (21)..(21): 3'-3 attached terminal deoxyabasic moeity
gacuguggcugcuagcacutt

SEQ ID NO: 1645 - DNA, 21 bp, Artificial Sequence
  Synthetic
  misc_feature (1)..(1): 5'-3 attached terminal deoxyabasic moeity
  misc_feature (1)..(19): RNA
  misc_feature (21)..(21): 3'-3 attached terminal deoxyabasic moeity
cacuaaagcaguggacacctt

SEQ ID NO: 1646 - DNA, 21 bp, Artificial Sequence
  Synthetic
  misc_feature (1)..(1): 5'-3 attached terminal deoxyabasic moeity
  misc_feature (1)..(19): RNA
  misc_feature (21)..(21): 3'-3 attached terminal deoxyabasic moeity
cuaaagcaguggacaccagtt

SEQ ID NO: 1647 - DNA, 21 bp, Artificial Sequence
  Synthetic
  misc_feature (1)..(1): 5'-3 attached terminal deoxyabasic moeity
  misc_feature (1)..(19): RNA
  misc_feature (21)..(21): 3'-3 attached terminal deoxyabasic moeity
aagcaguggacaccaggagtt

SEQ ID NO: 1648 - DNA, 21 bp, Artificial Sequence
  Synthetic
  misc_feature (1)..(1): 5'-3 attached terminal deoxyabasic moeity
  misc_feature (1)..(19): RNA
  misc_feature (21)..(21): 3'-3 attached terminal deoxyabasic moeity
aaggguaccuugaacacugtt

SEQ ID NO: 1649 - DNA, 21 bp, Artificial Sequence
  Synthetic
  misc_feature (20)..(20): Phosphorothioate 3'-Internucleotide Linkage
  misc_feature (1)..(19): RNA
gcagguccuuuacaaacugtt

SEQ ID NO: 1650 - DNA, 21 bp, Artificial Sequence
  Synthetic
  misc_feature (20)..(20): Phosphorothioate 3'-Internucleotide Linkage
  misc_feature (1)..(19): RNA
caguugccugugugugaagtt

SEQ ID NO: 1651 - DNA, 21 bp, Artificial Sequence
  Synthetic
  misc_feature (20)..(20): Phosphorothioate 3'-Internucleotide Linkage
  misc_feature (1)..(19): RNA
accaagaagaagugugccutt

SEQ ID NO: 1652 - DNA, 21 bp, Artificial Sequence
  Synthetic
  misc_feature (20)..(20): Phosphorothioate 3'-Internucleotide Linkage
  misc_feature (1)..(19): RNA
agugcuagcagccacaguctt

SEQ ID NO: 1653 - DNA, 21 bp, Artificial Sequence
  Synthetic
  misc_feature (20)..(20): Phosphorothioate 3'-Internucleotide Linkage
  misc_feature (1)..(19): RNA
gguguccacugcuuuagugtt

SEQ ID NO: 1654 - DNA, 21 bp, Artificial Sequence
  Synthetic
  misc_feature (20)..(20): Phosphorothioate 3'-Internucleotide Linkage
  misc_feature (1)..(19): RNA
cugguguccacugcuuuagtt

SEQ ID NO: 1655 - DNA, 21 bp, Artificial Sequence
  Synthetic
  misc_feature (20)..(20): Phosphorothioate 3'-Internucleotide Linkage
  misc_feature (1)..(19): RNA
cuccugguguccacugcuutt

SEQ ID NO: 1656 - DNA, 21 bp, Artificial Sequence
  Synthetic
  misc_feature (20)..(20): Phosphorothioate 3'-Internucleotide Linkage
  misc_feature (1)..(19): RNA
caguguucaagguacccuutt

SEQ ID NO: 1657 - DNA, 21 bp, Artificial Sequence
  Synthetic
  misc_feature (1)..(1): 5'-3 attached terminal deoxyabasic moeity
  misc_feature (1)..(19): RNA
  misc_feature (21)..(21): 3'-3 attached terminal deoxyabasic moeity
caguuuguaaaggaccugctt

SEQ ID NO: 1658 - DNA, 21 bp, Artificial Sequence
  Synthetic
  misc_feature (1)..(1): 5'-3 attached terminal deoxyabasic moeity
  misc_feature (1)..(19): RNA
  misc_feature (21)..(21): 3'-3 attached terminal deoxyabasic moeity
cuucacacacaggcaacugtt

SEQ ID NO: 1659 - DNA, 21 bp, Artificial Sequence
  Synthetic
  misc_feature (1)..(1): 5'-3 attached terminal deoxyabasic moeity
  misc_feature (1)..(19): RNA
  misc_feature (21)..(21): 3'-3 attached terminal deoxyabasic moeity
aggcacacuucuucuuggutt

SEQ ID NO: 1660 - DNA, 21 bp, Artificial Sequence
  Synthetic
  misc_feature (1)..(1): 5'-3 attached terminal deoxyabasic moeity
  misc_feature (1)..(19): RNA
  misc_feature (21)..(21): 3'-3 attached terminal deoxyabasic moeity
gacuguggcugcuagcacutt

SEQ ID NO: 1661 - DNA, 21 bp, Artificial Sequence
  Synthetic
  misc_feature (1)..(1): 5'-3 attached terminal deoxyabasic moeity
  misc_feature (1)..(19): RNA
  misc_feature (21)..(21): 3'-3 attached terminal deoxyabasic moeity
cacuaaagcaguggacacctt

SEQ ID NO: 1662 - DNA, 21 bp, Artificial Sequence
  Synthetic
  misc_feature (1)..(1): 5'-3 attached terminal deoxyabasic moeity
  misc_feature (1)..(19): RNA
  misc_feature (21)..(21): 3'-3 attached terminal deoxyabasic moeity
cuaaagcaguggacaccagtt

SEQ ID NO: 1663 - DNA, 21 bp, Artificial Sequence
  Synthetic
  misc_feature (1)..(1): 5'-3 attached terminal deoxyabasic moeity
  misc_feature (1)..(19): RNA
  misc_feature (21)..(21): 3'-3 attached terminal deoxyabasic moeity
aagcaguggacaccaggagtt

SEQ ID NO: 1664 - DNA, 21 bp, Artificial Sequence
  Synthetic
  misc_feature (1)..(1): 5'-3 attached terminal deoxyabasic moeity
  misc_feature (1)..(19): RNA
  misc_feature (21)..(21): 3'-3 attached terminal deoxyabasic moeity
aaggguaccuugaacacugtt

SEQ ID NO: 1665 - DNA, 21 bp, Artificial Sequence
  Synthetic
  misc_feature (20)..(20): Phosphorothioate 3'-Internucleotide Linkage
  misc_feature (1)..(19): RNA
ucauuuaaauaacacacaatt

SEQ ID NO: 1666 - DNA, 21 bp, Artificial Sequence
  Synthetic
  misc_feature (20)..(20): Phosphorothioate 3'-Internucleotide Linkage
  misc_feature (1)..(19): RNA
cucauuuaaauaacacacatt

SEQ ID NO: 1667 - DNA, 21 bp, Artificial Sequence
  Synthetic
  misc_feature (20)..(20): Phosphorothioate 3'-Internucleotide Linkage
  misc_feature (1)..(19): RNA
acucauuuaaauaacacactt

SEQ ID NO: 1668 - DNA, 21 bp, Artificial Sequence
  Synthetic
  misc_feature (20)..(20): Phosphorothioate 3'-Internucleotide Linkage
  misc_feature (1)..(19): RNA
cauuuaaauaacacacaautt

SEQ ID NO: 1669 - DNA, 21 bp, Artificial Sequence
  Synthetic
  misc_feature (20)..(20): Phosphorothioate 3'-Internucleotide Linkage
  misc_feature (1)..(19): RNA
ccauaccaugcugccauugtt

SEQ ID NO: 1670 - DNA, 21 bp, Artificial Sequence
  Synthetic
  misc_feature (20)..(20): Phosphorothioate 3'-Internucleotide Linkage
  misc_feature (1)..(19): RNA
uccauaccaugcugccauutt

SEQ ID NO: 1671 - DNA, 21 bp, Artificial Sequence
  Synthetic
  misc_feature (20)..(20): Phosphorothioate 3'-Internucleotide Linkage
  misc_feature (1)..(19): RNA
cuccauaccaugcugccautt

SEQ ID NO: 1672 - DNA, 21 bp, Artificial Sequence
  Synthetic
  misc_feature (20)..(20): Phosphorothioate 3'-Internucleotide Linkage
  misc_feature (1)..(19): RNA
uuaaauaacacacaauaautt

SEQ ID NO: 1673 - DNA, 21 bp, Artificial Sequence
  Synthetic
  misc_feature (20)..(20): Phosphorothioate 3'-Internucleotide Linkage
  misc_feature (1)..(19): RNA
uuuaaauaacacacaauaatt

SEQ ID NO: 1674 - DNA, 21 bp, Artificial Sequence
  Synthetic
  misc_feature (20)..(20): Phosphorothioate 3'-Internucleotide Linkage
  misc_feature (1)..(19): RNA
auuuaaauaacacacaauatt

SEQ ID NO: 1675 - DNA, 21 bp, Artificial Sequence
  Synthetic
  misc_feature (20)..(20): Phosphorothioate 3'-Internucleotide Linkage
  misc_feature (1)..(19): RNA
gcagguccuuuacaaacugtt

SEQ ID NO: 1676 - DNA, 21 bp, Artificial Sequence
  Synthetic
  misc_feature (20)..(20): Phosphorothioate 3'-Internucleotide Linkage
  misc_feature (1)..(19): RNA
caguugccugugugugaagtt

SEQ ID NO: 1677 - DNA, 21 bp, Artificial Sequence
  Synthetic
  misc_feature (20)..(20): Phosphorothioate 3'-Internucleotide Linkage
  misc_feature (1)..(19): RNA
accaagaagaagugugccutt

SEQ ID NO: 1678 - DNA, 21 bp, Artificial Sequence
  Synthetic
  misc_feature (20)..(20): Phosphorothioate 3'-Internucleotide Linkage
  misc_feature (1)..(19): RNA
agugcuagcagccacaguctt

SEQ ID NO: 1679 - DNA, 21 bp, Artificial Sequence
  Synthetic
  misc_feature (20)..(20): Phosphorothioate 3'-Internucleotide Linkage
  misc_feature (1)..(19): RNA
gguguccacugcuuuagugtt

SEQ ID NO: 1680 - DNA, 21 bp, Artificial Sequence
  Synthetic
  misc_feature (20)..(20): Phosphorothioate 3'-Internucleotide Linkage
  misc_feature (1)..(19): RNA
cugguguccacugcuuuagtt

SEQ ID NO: 1681 - DNA, 21 bp, Artificial Sequence
  Synthetic
  misc_feature (20)..(20): Phosphorothioate 3'-Internucleotide Linkage
  misc_feature (1)..(19): RNA
cuccugguguccacugcuutt

SEQ ID NO: 1682 - DNA, 21 bp, Artificial Sequence
  Synthetic
  misc_feature (20)..(20): Phosphorothioate 3'-Internucleotide Linkage
  misc_feature (1)..(19): RNA
caguguucaagguacccuutt

SEQ ID NO: 1683 - DNA, 21 bp, Artificial Sequence
  Synthetic
  misc_feature (1)..(1): 5'-3 attached terminal deoxyabasic moeity
  misc_feature (1)..(19): RNA
  misc_feature (21)..(21): 3'-3 attached terminal deoxyabasic moeity
caguuuguaaaggaccugctt

SEQ ID NO: 1684 - DNA, 21 bp, Artificial Sequence
  Synthetic
  misc_feature (1)..(1): 5'-3 attached terminal deoxyabasic moeity
  misc_feature (1)..(19): RNA
  misc_feature (21)..(21): 3'-3 attached terminal deoxyabasic moeity
cuucacacacaggcaacugtt

SEQ ID NO: 1685 - DNA, 21 bp, Artificial Sequence
  Synthetic
  misc_feature (1)..(1): 5'-3 attached terminal deoxyabasic moeity
  misc_feature (1)..(19): RNA
  misc_feature (21)..(21): 3'-3 attached terminal deoxyabasic moeity
aggcacacuucuucuuggutt

SEQ ID NO: 1686 - DNA, 21 bp, Artificial Sequence
  Synthetic
  misc_feature (1)..(1): 5'-3 attached terminal deoxyabasic moeity
  misc_feature (1)..(19): RNA
  misc_feature (21)..(21): 3'-3 attached terminal deoxyabasic moeity
gacuguggcugcuagcacutt

SEQ ID NO: 1687 - DNA, 21 bp, Artificial Sequence
  Synthetic
  misc_feature (1)..(1): 5'-3 attached terminal deoxyabasic moeity
  misc_feature (1)..(19): RNA
  misc_feature (21)..(21): 3'-3 attached terminal deoxyabasic moeity
cacuaaagcaguggacacctt

SEQ ID NO: 1688 - DNA, 21 bp, Artificial Sequence
  Synthetic
  misc_feature (1)..(1): 5'-3 attached terminal deoxyabasic moeity
  misc_feature (1)..(19): RNA
cuaaagcaguggacaccagtt

SEQ ID NO: 1689 - DNA, 21 bp, Artificial Sequence
  Synthetic
  misc_feature (1)..(1): 5'-3 attached terminal deoxyabasic moeity
  misc_feature (1)..(19): RNA
  misc_feature (21)..(21): 3'-3 attached terminal deoxyabasic moeity
aagcaguggacaccaggagtt

SEQ ID NO: 1690 - DNA, 21 bp, Artificial Sequence
  Synthetic
  misc_feature (1)..(1): 5'-3 attached terminal deoxyabasic moeity
  misc_feature (1)..(19): RNA
  misc_feature (21)..(21): 3'-3 attached terminal deoxyabasic moeity
aaggguaccuugaacacugtt

SEQ ID NO: 1691 - DNA, 21 bp, Artificial Sequence
  Synthetic
  misc_feature (20)..(20): Phosphorothioate 3'-Internucleotide Linkage
  misc_feature (1)..(19): RNA
gcagguccuuuacaaacugtt

SEQ ID NO: 1692 - DNA, 21 bp, Artificial Sequence
  Synthetic
  misc_feature (20)..(20): Phosphorothioate 3'-Internucleotide Linkage
  misc_feature (1)..(19): RNA
caguugccugugugugaagtt

SEQ ID NO: 1693 - DNA, 21 bp, Artificial Sequence
  Synthetic
  misc_feature (20)..(20): Phosphorothioate 3'-Internucleotide Linkage
  misc_feature (1)..(19): RNA
accaagaagaagugugccutt

SEQ ID NO: 1694 - DNA, 21 bp, Artificial Sequence
  Synthetic
  misc_feature (20)..(20): Phosphorothioate 3'-Internucleotide Linkage
  misc_feature (1)..(19): RNA
agugcuagcagccacaguctt

SEQ ID NO: 1695 - DNA, 21 bp, Artificial Sequence
  Synthetic
  misc_feature (20)..(20): Phosphorothioate 3'-Internucleotide Linkage
  misc_feature (1)..(19): RNA
gguguccacugcuuuagugtt

SEQ ID NO: 1696 - DNA, 21 bp, Artificial Sequence
  Synthetic
  misc_feature (20)..(20): Phosphorothioate 3'-Internucleotide Linkage
  misc_feature (1)..(19): RNA
cugguguccacugcuuuagtt

SEQ ID NO: 1697 - DNA, 21 bp, Artificial Sequence
  Synthetic
  misc_feature (20)..(20): Phosphorothioate 3'-Internucleotide Linkage
  misc_feature (1)..(19): RNA
cuccugguguccacugcuutt

SEQ ID NO: 1698 - DNA, 21 bp, Artificial Sequence
  Synthetic
  misc_feature (20)..(20): Phosphorothioate 3'-Internucleotide Linkage
  misc_feature (1)..(19): RNA
caguguucaagguacccuutt

SEQ ID NO: 1699 - DNA, 21 bp, Artificial Sequence
  Synthetic
  misc_feature (1)..(19): RNA
  misc_feature (21)..(21): 3'-3 attached terminal deoxyabasic moeity
gcagguccuuuacaaacugtt

SEQ ID NO: 1700 - DNA, 21 bp, Artificial Sequence
  Synthetic
  misc_feature (1)..(19): RNA
  misc_feature (21)..(21): 3'-3 attached terminal deoxyabasic moeity
caguugccugugugugaagtt

SEQ ID NO: 1701 - DNA, 21 bp, Artificial Sequence
  Synthetic
  misc_feature (1)..(19): RNA
  misc_feature (21)..(21): 3'-3 attached terminal deoxyabasic moeity
accaagaagaagugugccutt

SEQ ID NO: 1702 - DNA, 21 bp, Artificial Sequence
  Synthetic
  misc_feature (1)..(19): RNA
  misc_feature (21)..(21): 3'-3 attached terminal deoxyabasic moeity
agugcuagcagccacaguctt

SEQ ID NO: 1703 - DNA, 21 bp, Artificial Sequence
  Synthetic
  misc_feature (1)..(19): RNA
  misc_feature (21)..(21): 3'-3 attached terminal deoxyabasic moeity
gguguccacugcuuuagugtt

SEQ ID NO: 1704 - DNA, 21 bp, Artificial Sequence
  Synthetic
  misc_feature (1)..(19): RNA
  misc_feature (21)..(21): 3'-3 attached terminal deoxyabasic moeity
cugguguccacugcuuuagtt

SEQ ID NO: 1705 - DNA, 21 bp, Artificial Sequence
  Synthetic
  misc_feature (1)..(19): RNA
  misc_feature (21)..(21): 3'-3 attached terminal deoxyabasic moeity
cuccugguguccacugcuutt

SEQ ID NO: 1706 - DNA, 21 bp, Artificial Sequence
  Synthetic
  misc_feature (1)..(19): RNA
  misc_feature (21)..(21): 3'-3 attached terminal deoxyabasic moeity
caguguucaagguacccuutt

SEQ ID NO: 1707 - DNA, 21 bp, Artificial Sequence
  Synthetic
  misc_feature (1)..(19): RNA
  misc_feature (21)..(21): 3'-3 attached terminal deoxyabasic moeity
gcagguccuuuacaaacugtt

SEQ ID NO: 1708 - DNA, 21 bp, Artificial Sequence
  Synthetic
  misc_feature (1)..(19): RNA
  misc_feature (21)..(21): 3'-3 attached terminal deoxyabasic moeity
caguugccugugugugaagtt

SEQ ID NO: 1709 - DNA, 21 bp, Artificial Sequence
  Synthetic
  misc_feature (1)..(19): RNA
  misc_feature (21)..(21): 3'-3 attached terminal deoxyabasic moeity
accaagaagaagugugccutt

SEQ ID NO: 1710 - DNA, 21 bp, Artificial Sequence
  Synthetic
  misc_feature (1)..(19): RNA
  misc_feature (21)..(21): 3'-3 attached terminal deoxyabasic moeity
agugcuagcagccacaguctt

SEQ ID NO: 1711 - DNA, 21 bp, Artificial Sequence
  Synthetic
  misc_feature (1)..(19): RNA
  misc_feature (21)..(21): 3'-3 attached terminal deoxyabasic moeity
gguguccacugcuuuagugtt

SEQ ID NO: 1712 - DNA, 21 bp, Artificial Sequence
  Synthetic
  misc_feature (1)..(19): RNA
  misc_feature (21)..(21): 3'-3 attached terminal deoxyabasic moeity
cugguguccacugcuuuagtt

SEQ ID NO: 1713 - DNA, 21 bp, Artificial Sequence
  Synthetic
  misc_feature (1)..(19): RNA
  misc_feature (21)..(21): 3'-3 attached terminal deoxyabasic moeity
cuccugguguccacugcuutt

SEQ ID NO: 1714 - DNA, 21 bp, Artificial Sequence
  Synthetic
  misc_feature (1)..(19): RNA
  misc_feature (21)..(21): 3'-3 attached terminal deoxyabasic moeity
caguguucaagguacccuutt

SEQ ID NO: 1715 - DNA, 21 bp, Artificial Sequence
  Synthetic
  misc_feature (1)..(19): RNA
ggugauccugagucugcugtt

SEQ ID NO: 1716 - DNA, 21 bp, Artificial Sequence
  Synthetic
  misc_feature (1)..(19): RNA
gucaaggauaaugcaggaatt

SEQ ID NO: 1717 - DNA, 21 bp, Artificial Sequence
  Synthetic
  misc_feature (1)..(19): RNA
uccaagaggcuaaaugugatt

SEQ ID NO: 1718 - DNA, 21 bp, Artificial Sequence
  Synthetic
  misc_feature (1)..(19): RNA
aaaccgacucuguagugcutt

SEQ ID NO: 1719 - DNA, 21 bp, Artificial Sequence
  Synthetic
  misc_feature (1)..(19): RNA
aagaaagccucucagugautt

SEQ ID NO: 1720 - DNA, 21 bp, Artificial Sequence
  Synthetic
  misc_feature (1)..(19): RNA
ugcaccauuuaaaaacaggtt

SEQ ID NO: 1721 - DNA, 21 bp, Artificial Sequence
  Synthetic
  misc_feature (1)..(19): RNA
gcauuuuccucugcuuugatt

SEQ ID NO: 1722 - DNA, 21 bp, Artificial Sequence
  Synthetic
  misc_feature (1)..(19): RNA
aagaccuuucaaagccauutt

SEQ ID NO: 1723 - DNA, 21 bp, Artificial Sequence
  Synthetic
  misc_feature (1)..(19): RNA
cagcagacucaggaucacctt

SEQ ID NO: 1724 - DNA, 21 bp, Artificial Sequence
  Synthetic
  misc_feature (1)..(19): RNA
uuccugcauuauccuugactt

SEQ ID NO: 1725 - DNA, 21 bp, Artificial Sequence
  Synthetic
  misc_feature (1)..(19): RNA
ucacauuuagccucuuggatt

SEQ ID NO: 1726 - DNA, 21 bp, Artificial Sequence
  Synthetic
  misc_feature (1)..(19): RNA
agcacuacagagucgguuutt

SEQ ID NO: 1727 - DNA, 21 bp, Artificial Sequence
  Synthetic
  misc_feature (1)..(19): RNA
aucacugagaggcuuucuutt

SEQ ID NO: 1728 - DNA, 21 bp, Artificial Sequence
  Synthetic
  misc_feature (1)..(19): RNA
ccuguuuuuaaauggugcatt

SEQ ID NO: 1729 - DNA, 21 bp, Artificial Sequence
  Synthetic
  misc_feature (1)..(19): RNA
ucaaagcagaggaaaaugctt

SEQ ID NO: 1730 - DNA, 21 bp, Artificial Sequence
  Synthetic
  misc_feature (1)..(19): RNA
aauggcuuugaaaggucuutt

SEQ ID NO: 1731 - DNA, 21 bp, Artificial Sequence
  Synthetic
  misc_feature (1)..(1): 5'-3 attached terminal deoxyabasic moeity
  misc_feature (1)..(19): RNA
  misc_feature (21)..(21): 3'-3 attached terminal deoxyabasic moeity
ggugauccugagucugcugtt

SEQ ID NO: 1732 - DNA, 21 bp, Artificial Sequence
  Synthetic
  misc_feature (1)..(1): 5'-3 attached terminal deoxyabasic moeity
  misc_feature (1)..(19): RNA
  misc_feature (21)..(21): 3'-3 attached terminal deoxyabasic moeity
gucaaggauaaugcaggaatt

SEQ ID NO: 1733 - DNA, 21 bp, Artificial Sequence
  Synthetic
  misc_feature (1)..(1): 5'-3 attached terminal deoxyabasic moeity
  misc_feature (1)..(19): RNA
  misc_feature (21)..(21): 3'-3 attached terminal deoxyabasic moeity
uccaagaggcuaaaugugatt

SEQ ID NO: 1734 - DNA, 21 bp, Artificial Sequence
  Synthetic
  misc_feature (1)..(1): 5'-3 attached terminal deoxyabasic moeity
  misc_feature (1)..(19): RNA
  misc_feature (21)..(21): 3'-3 attached terminal deoxyabasic moeity
aaaccgacucuguagugcutt

SEQ ID NO: 1735 - DNA, 21 bp, Artificial Sequence
  Synthetic
  misc_feature (1)..(1): 5'-3 attached terminal deoxyabasic moeity
  misc_feature (1)..(19): RNA
  misc_feature (21)..(21): 3'-3 attached terminal deoxyabasic moeity
aagaaagccucucagugautt

SEQ ID NO: 1736 - DNA, 21 bp, Artificial Sequence
  Synthetic
  misc_feature (1)..(1): 5'-3 attached terminal deoxyabasic moeity
  misc_feature (1)..(19): RNA
  misc_feature (21)..(21): 3'-3 attached terminal deoxyabasic moeity
ugcaccauuuaaaaacaggtt

SEQ ID NO: 1737 - DNA, 21 bp, Artificial Sequence
  Synthetic
  misc_feature (1)..(1): 5'-3 attached terminal deoxyabasic moeity
  misc_feature (1)..(19): RNA
  misc_feature (21)..(21): 3'-3 attached terminal deoxyabasic moeity
gcauuuuccucugcuuugatt

SEQ ID NO: 1738 - DNA, 21 bp, Artificial Sequence
  Synthetic
  misc_feature (1)..(1): 5'-3 attached terminal deoxyabasic moeity
  misc_feature (1)..(19): RNA
  misc_feature (21)..(21): 3'-3 attached terminal deoxyabasic moeity
aagaccuuucaaagccauutt

SEQ ID NO: 1739 - DNA, 21 bp, Artificial Sequence
  Synthetic
  misc_feature (20)..(20): Phosphorothioate 3'-Internucleotide Linkage
  misc_feature (1)..(19): RNA
cagcagacucaggaucacctt

SEQ ID NO: 1740 - DNA, 21 bp, Artificial Sequence
  Synthetic
  misc_feature (20)..(20): Phosphorothioate 3'-Internucleotide Linkage
  misc_feature (1)..(19): RNA
uuccugcauuauccuugactt

SEQ ID NO: 1741 - DNA, 21 bp, Artificial Sequence
  Synthetic
  misc_feature (20)..(20): Phosphorothioate 3'-Internucleotide Linkage
  misc_feature (1)..(19): RNA
ucacauuuagccucuuggatt

SEQ ID NO: 1742 - DNA, 21 bp, Artificial Sequence
  Synthetic
  misc_feature (20)..(20): Phosphorothioate 3'-Internucleotide Linkage
  misc_feature (1)..(19): RNA
agcacuacagagucgguuutt

SEQ ID NO: 1743 - DNA, 21 bp, Artificial Sequence
  Synthetic
  misc_feature (20)..(20): Phosphorothioate 3'-Internucleotide Linkage
  misc_feature (1)..(19): RNA
aucacugagaggcuuucuutt

SEQ ID NO: 1744 - DNA, 21 bp, Artificial Sequence
  Synthetic
  misc_feature (20)..(20): Phosphorothioate 3'-Internucleotide Linkage
  misc_feature (1)..(19): RNA
ccuguuuuuaaauggugcatt

SEQ ID NO: 1745 - DNA, 21 bp, Artificial Sequence
  Synthetic
  misc_feature (20)..(20): Phosphorothioate 3'-Internucleotide Linkage
  misc_feature (1)..(19): RNA
ucaaagcagaggaaaaugctt

SEQ ID NO: 1746 - DNA, 21 bp, Artificial Sequence
  Synthetic
  misc_feature (20)..(20): Phosphorothioate 3'-Internucleotide Linkage
  misc_feature (1)..(19): RNA
aauggcuuugaaaggucuutt

SEQ ID NO: 1747 - DNA, 21 bp, Artificial Sequence
  Synthetic
  misc_feature (1)..(1): 5'-3 attached terminal deoxyabasic moeity
  misc_feature (1)..(19): RNA
  misc_feature (21)..(21): 3'-3 attached terminal deoxyabasic moeity
ggugauccugagucugcugtt

SEQ ID NO: 1748 - DNA, 21 bp, Artificial Sequence
  Synthetic
  misc_feature (1)..(1): 5'-3 attached terminal deoxyabasic moeity
  misc_feature (1)..(19): RNA
  misc_feature (21)..(21): 3'-3 attached terminal deoxyabasic moeity
gucaaggauaaugcaggaatt

SEQ ID NO: 1749 - DNA, 21 bp, Artificial Sequence
  Synthetic
  misc_feature (1)..(1): 5'-3 attached terminal deoxyabasic moeity
  misc_feature (1)..(19): RNA
  misc_feature (21)..(21): 3'-3 attached terminal deoxyabasic moeity
uccaagaggcuaaaugugatt

SEQ ID NO: 1750 - DNA, 21 bp, Artificial Sequence
  Synthetic
  misc_feature (1)..(1): 5'-3 attached terminal deoxyabasic moeity
  misc_feature (1)..(19): RNA
  misc_feature (21)..(21): 3'-3 attached terminal deoxyabasic moeity
aaaccgacucuguagugcutt

SEQ ID NO: 1751 - DNA, 21 bp, Artificial Sequence
  Synthetic
  misc_feature (1)..(1): 5'-3 attached terminal deoxyabasic moeity
  misc_feature (1)..(19): RNA
  misc_feature (21)..(21): 3'-3 attached terminal deoxyabasic moeity
aagaaagccucucagugautt

SEQ ID NO: 1752 - DNA, 21 bp, Artificial Sequence
  Synthetic
  misc_feature (1)..(1): 5'-3 attached terminal deoxyabasic moeity
  misc_feature (1)..(19): RNA
  misc_feature (21)..(21): 3'-3 attached terminal deoxyabasic moeity
ugcaccauuuaaaaacaggtt

SEQ ID NO: 1753 - DNA, 21 bp, Artificial Sequence
  Synthetic
  misc_feature (1)..(1): 5'-3 attached terminal deoxyabasic moeity
  misc_feature (1)..(19): RNA
  misc_feature (21)..(21): 3'-3 attached terminal deoxyabasic moeity
gcauuuuccucugcuuugatt

SEQ ID NO: 1754 - DNA, 21 bp, Artificial Sequence
  Synthetic
  misc_feature (1)..(1): 5'-3 attached terminal deoxyabasic moeity
  misc_feature (1)..(19): RNA
  misc_feature (21)..(21): 3'-3 attached terminal deoxyabasic moeity
aagaccuuucaaagccauutt

SEQ ID NO: 1755 - DNA, 21 bp, Artificial Sequence
  Synthetic
  misc_feature (20)..(20): Phosphorothioate 3'-Internucleotide Linkage
  misc_feature (1)..(19): RNA
cagcagacucaggaucacctt

SEQ ID NO: 1756 - DNA, 21 bp, Artificial Sequence
  Synthetic
  misc_feature (20)..(20): Phosphorothioate 3'-Internucleotide Linkage
  misc_feature (1)..(19): RNA
uuccugcauuauccuugactt

SEQ ID NO: 1757 - DNA, 21 bp, Artificial Sequence
  Synthetic
  misc_feature (20)..(20): Phosphorothioate 3'-Internucleotide Linkage
  misc_feature (1)..(19): RNA
ucacauuuagccucuuggatt

SEQ ID NO: 1758 - DNA, 21 bp, Artificial Sequence
  Synthetic
  misc_feature (20)..(20): Phosphorothioate 3'-Internucleotide Linkage
  misc_feature (1)..(19): RNA
agcacuacagagucgguuutt

SEQ ID NO: 1759 - DNA, 21 bp, Artificial Sequence
  Synthetic
  misc_feature (20)..(20): Phosphorothioate 3'-Internucleotide Linkage
  misc_feature (1)..(19): RNA
aucacugagaggcuuucuutt

SEQ ID NO: 1760 - DNA, 21 bp, Artificial Sequence
  Synthetic
  misc_feature (20)..(20): Phosphorothioate 3'-Internucleotide Linkage
  misc_feature (1)..(19): RNA
ccuguuuuuaaauggugcatt

SEQ ID NO: 1761 - DNA, 21 bp, Artificial Sequence
  Synthetic
  misc_feature (20)..(20): Phosphorothioate 3'-Internucleotide Linkage
  misc_feature (1)..(19): RNA
ucaaagcagaggaaaaugctt

SEQ ID NO: 1762 - DNA, 21 bp, Artificial Sequence
  Synthetic
  misc_feature (20)..(20): Phosphorothioate 3'-Internucleotide Linkage
  misc_feature (1)..(19): RNA
aauggcuuugaaaggucuutt

SEQ ID NO: 1763 - DNA, 21 bp, Artificial Sequence
  Synthetic
  misc_feature (1)..(1): 5'-3 attached terminal deoxyabasic moeity
  misc_feature (1)..(19): RNA
  misc_feature (21)..(21): 3'-3 attached terminal deoxyabasic moeity
ggugauccugagucugcugtt

SEQ ID NO: 1764 - DNA, 21 bp, Artificial Sequence
  Synthetic
  misc_feature (1)..(1): 5'-3 attached terminal deoxyabasic moeity
  misc_feature (1)..(19): RNA
  misc_feature (21)..(21): 3'-3 attached terminal deoxyabasic moeity
gucaaggauaaugcaggaatt

SEQ ID NO: 1765 - DNA, 21 bp, Artificial Sequence
  Synthetic
  misc_feature (1)..(1): 5'-3 attached terminal deoxyabasic moeity
  misc_feature (1)..(19): RNA
  misc_feature (21)..(21): 3'-3 attached terminal deoxyabasic moeity
uccaagaggcuaaaugugatt

SEQ ID NO: 1766 - DNA, 21 bp, Artificial Sequence
  Synthetic
  misc_feature (1)..(1): 5'-3 attached terminal deoxyabasic moeity
  misc_feature (1)..(19): RNA
  misc_feature (21)..(21): 3'-3 attached terminal deoxyabasic moeity
aaaccgacucuguagugcutt

SEQ ID NO: 1767 - DNA, 21 bp, Artificial Sequence
  Synthetic
  misc_feature (1)..(1): 5'-3 attached terminal deoxyabasic moeity
  misc_feature (1)..(19): RNA
  misc_feature (21)..(21): 3'-3 attached terminal deoxyabasic moeity
aagaaagccucucagugautt

SEQ ID NO: 1768 - DNA, 21 bp, Artificial Sequence
  Synthetic
  misc_feature (1)..(1): 5'-3 attached terminal deoxyabasic moeity
  misc_feature (1)..(19): RNA
  misc_feature (21)..(21): 3'-3 attached terminal deoxyabasic moeity
ugcaccauuuaaaaacaggtt

SEQ ID NO: 1769 - DNA, 21 bp, Artificial Sequence
  Synthetic
  misc_feature (1)..(1): 5'-3 attached terminal deoxyabasic moeity
  misc_feature (1)..(19): RNA
  misc_feature (21)..(21): 3'-3 attached terminal deoxyabasic moeity
gcauuuuccucugcuuugatt

SEQ ID NO: 1770 - DNA, 21 bp, Artificial Sequence
  Synthetic
  misc_feature (1)..(1): 5'-3 attached terminal deoxyabasic moeity
  misc_feature (1)..(19): RNA
  misc_feature (21)..(21): 3'-3 attached terminal deoxyabasic moeity
aagaccuuucaaagccauutt

SEQ ID NO: 1771 - DNA, 21 bp, Artificial Sequence
  Synthetic
  misc_feature (20)..(20): Phosphorothioate 3'-Internucleotide Linkage
  misc_feature (1)..(19): RNA
cagcagacucaggaucacctt

SEQ ID NO: 1772 - DNA, 21 bp, Artificial Sequence
  Synthetic
  misc_feature (20)..(20): Phosphorothioate 3'-Internucleotide Linkage
  misc_feature (1)..(19): RNA
uuccugcauuauccuugactt

SEQ ID NO: 1773 - DNA, 21 bp, Artificial Sequence
  Synthetic
  misc_feature (20)..(20): Phosphorothioate 3'-Internucleotide Linkage
  misc_feature (1)..(19): RNA
ucacauuuagccucuuggatt

SEQ ID NO: 1774 - DNA, 21 bp, Artificial Sequence
  Synthetic
  misc_feature (20)..(20): Phosphorothioate 3'-Internucleotide Linkage
  misc_feature (1)..(19): RNA
agcacuacagagucgguuutt

SEQ ID NO: 1775 - DNA, 21 bp, Artificial Sequence
  Synthetic
  misc_feature (20)..(20): Phosphorothioate 3'-Internucleotide Linkage
  misc_feature (1)..(19): RNA
aucacugagaggcuuucuutt

SEQ ID NO: 1776 - DNA, 21 bp, Artificial Sequence
  Synthetic
  misc_feature (20)..(20): Phosphorothioate 3'-Internucleotide Linkage
  misc_feature (1)..(19): RNA
ccuguuuuuaaauggugcatt

SEQ ID NO: 1777 - DNA, 21 bp, Artificial Sequence
  Synthetic
  misc_feature (20)..(20): Phosphorothioate 3'-Internucleotide Linkage
  misc_feature (1)..(19): RNA
ucaaagcagaggaaaaugctt

SEQ ID NO: 1778 - DNA, 21 bp, Artificial Sequence
  Synthetic
  misc_feature (20)..(20): Phosphorothioate 3'-Internucleotide Linkage
  misc_feature (1)..(19): RNA
aauggcuuugaaaggucuutt

SEQ ID NO: 1779 - DNA, 21 bp, Artificial Sequence
  Synthetic
  misc_feature (1)..(1): 5'-3 attached terminal deoxyabasic moeity
  misc_feature (1)..(19): RNA
  misc_feature (21)..(21): 3'-3 attached terminal deoxyabasic moeity
ggugauccugagucugcugtt

SEQ ID NO: 1780 - DNA, 21 bp, Artificial Sequence
  Synthetic
  misc_feature (1)..(1): 5'-3 attached terminal deoxyabasic moeity
  misc_feature (1)..(19): RNA
  misc_feature (21)..(21): 3'-3 attached terminal deoxyabasic moeity
gucaaggauaaugcaggaatt

SEQ ID NO: 1781 - DNA, 21 bp, Artificial Sequence
  Synthetic
  misc_feature (1)..(1): 5'-3 attached terminal deoxyabasic moeity
  misc_feature (1)..(19): RNA
  misc_feature (21)..(21): 3'-3 attached terminal deoxyabasic moeity
uccaagaggcuaaaugugatt

SEQ ID NO: 1782 - DNA, 21 bp, Artificial Sequence
  Synthetic
  misc_feature (1)..(1): 5'-3 attached terminal deoxyabasic moeity
  misc_feature (1)..(19): RNA
  misc_feature (21)..(21): 3'-3 attached terminal deoxyabasic moeity
aaaccgacucuguagugcutt

SEQ ID NO: 1783 - DNA, 21 bp, Artificial Sequence
  Synthetic
  misc_feature (1)..(1): 5'-3 attached terminal deoxyabasic moeity
  misc_feature (1)..(19): RNA
  misc_feature (21)..(21): 3'-3 attached terminal deoxyabasic moeity
aagaaagccucucagugautt

SEQ ID NO: 1784 - DNA, 21 bp, Artificial Sequence
  Synthetic
  misc_feature (1)..(1): 5'-3 attached terminal deoxyabasic moeity
  misc_feature (1)..(19): RNA
  misc_feature (21)..(21): 3'-3 attached terminal deoxyabasic moeity
ugcaccauuuaaaaacaggtt

SEQ ID NO: 1785 - DNA, 21 bp, Artificial Sequence
  Synthetic
  misc_feature (1)..(1): 5'-3 attached terminal deoxyabasic moeity
  misc_feature (1)..(19): RNA
  misc_feature (21)..(21): 3'-3 attached terminal deoxyabasic moeity
gcauuuuccucugcuuugatt

SEQ ID NO: 1786 - DNA, 21 bp, Artificial Sequence
  Synthetic
  misc_feature (1)..(1): 5'-3 attached terminal deoxyabasic moeity
  misc_feature (1)..(19): RNA
  misc_feature (21)..(21): 3'-3 attached terminal deoxyabasic moeity
aagaccuuucaaagccauutt

SEQ ID NO: 1787 - DNA, 21 bp, Artificial Sequence
  Synthetic
  misc_feature (20)..(20): Phosphorothioate 3'-Internucleotide Linkage
  misc_feature (1)..(19): RNA
cagcagacucaggaucacctt

SEQ ID NO: 1788 - DNA, 21 bp, Artificial Sequence
  Synthetic
  misc_feature (20)..(20): Phosphorothioate 3'-Internucleotide Linkage
  misc_feature (1)..(19): RNA
uuccugcauuauccuugactt

SEQ ID NO: 1789 - DNA, 21 bp, Artificial Sequence
  Synthetic
  misc_feature (20)..(20): Phosphorothioate 3'-Internucleotide Linkage
  misc_feature (1)..(19): RNA
ucacauuuagccucuuggatt

SEQ ID NO: 1790 - DNA, 21 bp, Artificial Sequence
  Synthetic
  misc_feature (20)..(20): Phosphorothioate 3'-Internucleotide Linkage
  misc_feature (1)..(19): RNA
agcacuacagagucgguuutt

SEQ ID NO: 1791 - DNA, 21 bp, Artificial Sequence
  Synthetic
  misc_feature (20)..(20): Phosphorothioate 3'-Internucleotide Linkage
  misc_feature (1)..(19): RNA
aucacugagaggcuuucuutt

SEQ ID NO: 1792 - DNA, 21 bp, Artificial Sequence
  Synthetic
  misc_feature (20)..(20): Phosphorothioate 3'-Internucleotide Linkage
  misc_feature (1)..(19): RNA
ccuguuuuuaaauggugcatt

SEQ ID NO: 1793 - DNA, 21 bp, Artificial Sequence
  Synthetic
  misc_feature (20)..(20): Phosphorothioate 3'-Internucleotide Linkage
  misc_feature (1)..(19): RNA
ucaaagcagaggaaaaugctt

SEQ ID NO: 1794 - DNA, 21 bp, Artificial Sequence
  Synthetic
  misc_feature (20)..(20): Phosphorothioate 3'-Internucleotide Linkage
  misc_feature (1)..(19): RNA
aauggcuuugaaaggucuutt

SEQ ID NO: 1795 - DNA, 21 bp, Artificial Sequence
  Synthetic
  misc_feature (1)..(19): RNA
  misc_feature (21)..(21): 3'-3 attached terminal deoxyabasic moeity
cagcagacucaggaucacctt

SEQ ID NO: 1796 - DNA, 21 bp, Artificial Sequence
  Synthetic
  misc_feature (1)..(19): RNA
  misc_feature (21)..(21): 3'-3 attached terminal deoxyabasic moeity
uuccugcauuauccuugactt

SEQ ID NO: 1797 - DNA, 21 bp, Artificial Sequence
  Synthetic
  misc_feature (1)..(19): RNA
  misc_feature (21)..(21): 3'-3 attached terminal deoxyabasic moeity
ucacauuuagccucuuggatt

SEQ ID NO: 1798 - DNA, 21 bp, Artificial Sequence
  Synthetic
  misc_feature (1)..(19): RNA
  misc_feature (21)..(21): 3'-3 attached terminal deoxyabasic moeity
agcacuacagagucgguuutt

SEQ ID NO: 1799 - DNA, 21 bp, Artificial Sequence
  Synthetic
  misc_feature (1)..(19): RNA
  misc_feature (21)..(21): 3'-3 attached terminal deoxyabasic moeity
aucacugagaggcuuucuutt

SEQ ID NO: 1800 - DNA, 21 bp, Artificial Sequence
  Synthetic
  misc_feature (1)..(19): RNA
  misc_feature (21)..(21): 3'-3 attached terminal deoxyabasic moeity
ccuguuuuuaaauggugcatt

SEQ ID NO: 1801 - DNA, 21 bp, Artificial Sequence
  Synthetic
  misc_feature (1)..(19): RNA
  misc_feature (21)..(21): 3'-3 attached terminal deoxyabasic moeity
ucaaagcagaggaaaaugctt

SEQ ID NO: 1802 - DNA, 21 bp, Artificial Sequence
  Synthetic
  misc_feature (1)..(19): RNA
  misc_feature (21)..(21): 3'-3 attached terminal deoxyabasic moeity
aauggcuuugaaaggucuutt

SEQ ID NO: 1803 - DNA, 21 bp, Artificial Sequence
  Synthetic
  misc_feature (1)..(19): RNA
  misc_feature (21)..(21): 3'-3 attached terminal deoxyabasic moeity
cagcagacucaggaucacctt

SEQ ID NO: 1804 - DNA, 21 bp, Artificial Sequence
  Synthetic
  misc_feature (1)..(19): RNA
  misc_feature (21)..(21): 3'-3 attached terminal deoxyabasic moeity
uuccugcauuauccuugactt

SEQ ID NO: 1805 - DNA, 21 bp, Artificial Sequence
  Synthetic
  misc_feature (1)..(19): RNA
  misc_feature (21)..(21): 3'-3 attached terminal deoxyabasic moeity
ucacauuuagccucuuggatt

SEQ ID NO: 1806 - DNA, 21 bp, Artificial Sequence
  Synthetic
  misc_feature (1)..(19): RNA
  misc_feature (21)..(21): 3'-3 attached terminal deoxyabasic moeity
agcacuacagagucgguuutt

SEQ ID NO: 1807 - DNA, 21 bp, Artificial Sequence
  Synthetic
  misc_feature (1)..(19): RNA
  misc_feature (21)..(21): 3'-3 attached terminal deoxyabasic moeity
aucacugagaggcuuucuutt

SEQ ID NO: 1808 - DNA, 21 bp, Artificial Sequence
  Synthetic
  misc_feature (1)..(19): RNA
  misc_feature (21)..(21): 3'-3 attached terminal deoxyabasic moeity
ccuguuuuuaaauggugcatt

SEQ ID NO: 1809 - DNA, 21 bp, Artificial Sequence
  Synthetic
  misc_feature (1)..(19): RNA
  misc_feature (21)..(21): 3'-3 attached terminal deoxyabasic moeity
ucaaagcagaggaaaaugctt

SEQ ID NO: 1810 - DNA, 21 bp, Artificial Sequence
  Synthetic
  misc_feature (1)..(19): RNA
  misc_feature (21)..(21): 3'-3 attached terminal deoxyabasic moeity
aauggcuuugaaaggucuutt

SEQ ID NO: 1811 - RNA, 23 nt, Artificial Sequence
  Synthetic
ugcaacggcagcaugguauggag

SEQ ID NO: 1812 - RNA, 23 nt, Artificial Sequence
  Synthetic
gcaacggcagcaugguauggagu

SEQ ID NO: 1813 - RNA, 23 nt, Artificial Sequence
  Synthetic
caacggcagcaugguauggagug

SEQ ID NO: 1814 - RNA, 23 nt, Artificial Sequence
  Synthetic
uuaugguuguguguuauuuaaau

SEQ ID NO: 1815 - RNA, 23 nt, Artificial Sequence
  Synthetic
uaugguuguguguuauuuaaaug

SEQ ID NO: 1816 - RNA, 23 nt, Artificial Sequence
  Synthetic
augguuguguguuauuuaaauga

SEQ ID NO: 1817 - RNA, 23 nt, Artificial Sequence
  Synthetic
ugguuguguguuauuuaaaugag

SEQ ID NO: 1818 - RNA, 23 nt, Artificial Sequence
  Synthetic
cauaacucugcuaccucacugua

SEQ ID NO: 1819 - RNA, 23 nt, Artificial Sequence
  Synthetic
aauagcuuagcaaagaguuaaua

SEQ ID NO: 1820 - RNA, 23 nt, Artificial Sequence
  Synthetic
uagcuuagcaaagaguuaauaau

SEQ ID NO: 1821 - RNA, 23 nt, Artificial Sequence
  Synthetic
cugggugacugcaguccuggcuc

SEQ ID NO: 1822 - RNA, 23 nt, Artificial Sequence
  Synthetic
ggugacugcaguccuggcucucg

SEQ ID NO: 1823 - RNA, 23 nt, Artificial Sequence
  Synthetic
gugacugcaguccuggcucucgc

SEQ ID NO: 1824 - RNA, 23 nt, Artificial Sequence
  Synthetic
ugacugcaguccuggcucucgcu

SEQ ID NO: 1825 - RNA, 23 nt, Artificial Sequence
  Synthetic
gacugcaguccuggcucucgcuu

SEQ ID NO: 1826 - RNA, 23 nt, Artificial Sequence
  Synthetic
cucagggagcuuaucgaggagcu

SEQ ID NO: 1827 - RNA, 23 nt, Artificial Sequence
  Synthetic
cgaggagcugagcaacaucacac

SEQ ID NO: 1828 - RNA, 23 nt, Artificial Sequence
  Synthetic
gaggagcugagcaacaucacaca

SEQ ID NO: 1829 - RNA, 23 nt, Artificial Sequence
  Synthetic
aggagcugagcaacaucacacaa

SEQ ID NO: 1830 - RNA, 23 nt, Artificial Sequence
  Synthetic
ggagcugagcaacaucacacaag

SEQ ID NO: 1831 - RNA, 23 nt, Artificial Sequence
  Synthetic
gagcugagcaacaucacacaaga

SEQ ID NO: 1832 - RNA, 23 nt, Artificial Sequence
  Synthetic
cugagcaacaucacacaagacca

SEQ ID NO: 1833 - RNA, 23 nt, Artificial Sequence
  Synthetic
ugagcaacaucacacaagaccag

SEQ ID NO: 1834 - RNA, 23 nt, Artificial Sequence
  Synthetic
gagcaacaucacacaagaccaga

SEQ ID NO: 1835 - RNA, 23 nt, Artificial Sequence
  Synthetic
agcaacaucacacaagaccagaa

SEQ ID NO: 1836 - RNA, 23 nt, Artificial Sequence
  Synthetic
gcaacaucacacaagaccagaag

SEQ ID NO: 1837 - RNA, 23 nt, Artificial Sequence
  Synthetic
cagaagacuucccugugcaacag

SEQ ID NO: 1838 - RNA, 23 nt, Artificial Sequence
  Synthetic
aacagcagcaugguauggagcgu

SEQ ID NO: 1839 - RNA, 23 nt, Artificial Sequence
  Synthetic
gacagcuggcggguucugugcag

SEQ ID NO: 1840 - RNA, 23 nt, Artificial Sequence
  Synthetic
aaucccugaccaacaucuccagu

SEQ ID NO: 1841 - RNA, 23 nt, Artificial Sequence
  Synthetic
aguugcaaugccauccacaggac

SEQ ID NO: 1842 - RNA, 23 nt, Artificial Sequence
  Synthetic
cacaggacccagaggauauugaa

SEQ ID NO: 1843 - RNA, 23 nt, Artificial Sequence
  Synthetic
cagauaccaaaaucgaaguagcc

SEQ ID NO: 1844 - RNA, 23 nt, Artificial Sequence
  Synthetic
agauaccaaaaucgaaguagccc

SEQ ID NO: 1845 - RNA, 23 nt, Artificial Sequence
  Synthetic
gauaccaaaaucgaaguagccca

SEQ ID NO: 1846 - RNA, 23 nt, Artificial Sequence
  Synthetic
auaccaaaaucgaaguagcccag

SEQ ID NO: 1847 - RNA, 23 nt, Artificial Sequence
  Synthetic
uaccaaaaucgaaguagcccagu

SEQ ID NO: 1848 - RNA, 23 nt, Artificial Sequence
  Synthetic
cucaauuacuccaagcaacuuuu

SEQ ID NO: 1849 - RNA, 23 nt, Artificial Sequence
  Synthetic
ucaauuacuccaagcaacuuuuc

SEQ ID NO: 1850 - RNA, 23 nt, Artificial Sequence
  Synthetic
caauuacuccaagcaacuuuucc

SEQ ID NO: 1851 - RNA, 23 nt, Artificial Sequence
  Synthetic
caacuuuuccgcuauggccacug

SEQ ID NO: 1852 - RNA, 23 nt, Artificial Sequence
  Synthetic
cucagcuguggaccucaguugug

SEQ ID NO: 1853 - RNA, 23 nt, Artificial Sequence
  Synthetic
gccacagaaguucagccaccugu

SEQ ID NO: 1854 - RNA, 23 nt, Artificial Sequence
  Synthetic
cacagaaguucagccaccuguga

SEQ ID NO: 1855 - RNA, 23 nt, Artificial Sequence
  Synthetic
acagaaguucagccaccugugac

SEQ ID NO: 1856 - RNA, 23 nt, Artificial Sequence
  Synthetic
agccaccugugacgaauuugagu

SEQ ID NO: 1857 - RNA, 23 nt, Artificial Sequence
  Synthetic
cucugucgaaaaucucugcacaa

SEQ ID NO: 1858 - RNA, 23 nt, Artificial Sequence
  Synthetic
ugaaagugagaagccuagcccuu

SEQ ID NO: 1859 - RNA, 23 nt, Artificial Sequence
  Synthetic
agugagaagccuagcccuuuggu

SEQ ID NO: 1860 - RNA, 23 nt, Artificial Sequence
  Synthetic
gagaagccuagcccuuuggugaa

SEQ ID NO: 1861 - RNA, 23 nt, Artificial Sequence
  Synthetic
ccuagcccuuuggugaaaaagug

SEQ ID NO: 1862 - RNA, 23 nt, Artificial Sequence
  Synthetic
ccuuuggugaaaaagugcaucuc

SEQ ID NO: 1863 - RNA, 23 nt, Artificial Sequence
  Synthetic
cuuuggugaaaaagugcaucuca

SEQ ID NO: 1864 - RNA, 23 nt, Artificial Sequence
  Synthetic
uuggugaaaaagugcaucucacc

SEQ ID NO: 1865 - RNA, 23 nt, Artificial Sequence
  Synthetic
gaacugcagugcacuuggcacaa

SEQ ID NO: 1866 - RNA, 23 nt, Artificial Sequence
  Synthetic
gcagugcacuuggcacaaccuga

SEQ ID NO: 1867 - RNA, 23 nt, Artificial Sequence
  Synthetic
uggcucccuggaaagaauacaag

SEQ ID NO: 1868 - RNA, 23 nt, Artificial Sequence
  Synthetic
ggggaaaagucuucaaugugaaa

SEQ ID NO: 1869 - RNA, 23 nt, Artificial Sequence
  Synthetic
ccuuuaaauugacuaaaguggaa

SEQ ID NO: 1870 - RNA, 23 nt, Artificial Sequence
  Synthetic
uaauggucaaggauaaugcuggg

SEQ ID NO: 1871 - RNA, 23 nt, Artificial Sequence
  Synthetic
aauggucaaggauaaugcuggga

SEQ ID NO: 1872 - RNA, 23 nt, Artificial Sequence
  Synthetic
auggucaaggauaaugcugggaa

SEQ ID NO: 1873 - RNA, 23 nt, Artificial Sequence
  Synthetic
ggucaaggauaaugcugggaaaa

SEQ ID NO: 1874 - RNA, 23 nt, Artificial Sequence
  Synthetic
ggauaaugcugggaaaauuaggc

SEQ ID NO: 1875 - RNA, 23 nt, Artificial Sequence
  Synthetic
uaaugcugggaaaauuaggccau

SEQ ID NO: 1876 - RNA, 23 nt, Artificial Sequence
  Synthetic
aaugcugggaaaauuaggccauc

SEQ ID NO: 1877 - RNA, 23 nt, Artificial Sequence
  Synthetic
cugggaaaauuaggccauccuac

SEQ ID NO: 1878 - RNA, 23 nt, Artificial Sequence
  Synthetic
uuuccucaaaaauggugccuuau

SEQ ID NO: 1879 - RNA, 23 nt, Artificial Sequence
  Synthetic
uuccucaaaaauggugccuuauu

SEQ ID NO: 1880 - RNA, 23 nt, Artificial Sequence
  Synthetic
agagguugaagaggacaaaugcc

SEQ ID NO: 1881 - RNA, 23 nt, Artificial Sequence
  Synthetic
gaagaggacaaaugccagaauuc

SEQ ID NO: 1882 - RNA, 23 nt, Artificial Sequence
  Synthetic
gccagaauucugaauuugauaga

SEQ ID NO: 1883 - RNA, 23 nt, Artificial Sequence
  Synthetic
ccagaauucugaauuugauagaa

SEQ ID NO: 1884 - RNA, 23 nt, Artificial Sequence
  Synthetic
uuugauagaaacauggagggugc

SEQ ID NO: 1885 - RNA, 23 nt, Artificial Sequence
  Synthetic
uguggaguaauuggagcgaagcg

SEQ ID NO: 1886 - RNA, 23 nt, Artificial Sequence
  Synthetic
guggaguaauuggagcgaagcgc

SEQ ID NO: 1887 - RNA, 23 nt, Artificial Sequence
  Synthetic
uggaguaauuggagcgaagcgcu

SEQ ID NO: 1888 - RNA, 23 nt, Artificial Sequence
  Synthetic
ggcuuaagaucauuauauuuccu

SEQ ID NO: 1889 - RNA, 23 nt, Artificial Sequence
  Synthetic
auuuccuccaauuccugauccug

SEQ ID NO: 1890 - RNA, 23 nt, Artificial Sequence
  Synthetic
caauuccugauccuggcaagauu

SEQ ID NO: 1891 - RNA, 23 nt, Artificial Sequence
  Synthetic
auuccugauccuggcaagauuuu

SEQ ID NO: 1892 - RNA, 23 nt, Artificial Sequence
  Synthetic
uuccugauccuggcaagauuuuu

SEQ ID NO: 1893 - RNA, 23 nt, Artificial Sequence
  Synthetic
ccuggcaagauuuuuaaagaaau

SEQ ID NO: 1894 - RNA, 23 nt, Artificial Sequence
  Synthetic
uuuuuaaagaaauguuuggagac

SEQ ID NO: 1895 - RNA, 23 nt, Artificial Sequence
  Synthetic
uggagaccagaaugaugauaccc

SEQ ID NO: 1896 - RNA, 23 nt, Artificial Sequence
  Synthetic
ggagaccagaaugaugauacccu

SEQ ID NO: 1897 - RNA, 23 nt, Artificial Sequence
  Synthetic
gaccagaaugaugauacccugca

SEQ ID NO: 1898 - RNA, 23 nt, Artificial Sequence
  Synthetic
accagaaugaugauacccugcac

SEQ ID NO: 1899 - RNA, 23 nt, Artificial Sequence
  Synthetic
ccagaaugaugauacccugcacu

SEQ ID NO: 1900 - RNA, 23 nt, Artificial Sequence
  Synthetic
aaugaugauacccugcacuggaa

SEQ ID NO: 1901 - RNA, 23 nt, Artificial Sequence
  Synthetic
agagagcuauugaugggucucag

SEQ ID NO: 1902 - RNA, 23 nt, Artificial Sequence
  Synthetic
gagagcuauugaugggucucagc

SEQ ID NO: 1903 - RNA, 23 nt, Artificial Sequence
  Synthetic
ugcuuucucauauguaccgggaa

SEQ ID NO: 1904 - RNA, 23 nt, Artificial Sequence
  Synthetic
cucauauguaccgggaacgguau

SEQ ID NO: 1905 - RNA, 23 nt, Artificial Sequence
  Synthetic
guauccacggauguaacgacagc

SEQ ID NO: 1906 - RNA, 23 nt, Artificial Sequence
  Synthetic
gauguaacgacagcccucugaga

SEQ ID NO: 1907 - RNA, 23 nt, Artificial Sequence
  Synthetic
aacgacagcccucugagagagau

SEQ ID NO: 1908 - RNA, 23 nt, Artificial Sequence
  Synthetic
aaccaggucacagaaaaagggac

SEQ ID NO: 1909 - RNA, 23 nt, Artificial Sequence
  Synthetic
ccaggucacagaaaaagggacuc

SEQ ID NO: 1910 - RNA, 23 nt, Artificial Sequence
  Synthetic
aggucacagaaaaagggacucca

SEQ ID NO: 1911 - RNA, 23 nt, Artificial Sequence
  Synthetic
aagggacuccaugcaccgagaug

SEQ ID NO: 1912 - RNA, 23 nt, Artificial Sequence
  Synthetic
ccgagauguuuguaccagacguc

SEQ ID NO: 1913 - RNA, 23 nt, Artificial Sequence
  Synthetic
cgagauguuuguaccagacgucc

SEQ ID NO: 1914 - RNA, 23 nt, Artificial Sequence
  Synthetic
cagacguccuuacggcaacaagg

SEQ ID NO: 1915 - RNA, 23 nt, Artificial Sequence
  Synthetic
acgagcucaucugcagggcuucc

SEQ ID NO: 1916 - RNA, 23 nt, Artificial Sequence
  Synthetic
aucugcagggcuuccagggugcu

SEQ ID NO: 1917 - RNA, 23 nt, Artificial Sequence
  Synthetic
gcaaauuuuacuucccacgugau

SEQ ID NO: 1918 - RNA, 23 nt, Artificial Sequence
  Synthetic
ucccacgugauguaccuccgugc

SEQ ID NO: 1919 - RNA, 23 nt, Artificial Sequence
  Synthetic
cccacgugauguaccuccgugcu

SEQ ID NO: 1920 - RNA, 23 nt, Artificial Sequence
  Synthetic
uaccuccgugcuugaagaacaag

SEQ ID NO: 1921 - RNA, 23 nt, Artificial Sequence
  Synthetic
ugaaugaguccacgcucacaaca

SEQ ID NO: 1922 - RNA, 23 nt, Artificial Sequence
  Synthetic
aacacugaaagacuuccuggaaa

SEQ ID NO: 1923 - RNA, 23 nt, Artificial Sequence
  Synthetic
acacugaaagacuuccuggaaag

SEQ ID NO: 1924 - RNA, 23 nt, Artificial Sequence
  Synthetic
cacugaaagacuuccuggaaagc

SEQ ID NO: 1925 - RNA, 23 nt, Artificial Sequence
  Synthetic
acugaaagacuuccuggaaagcc

SEQ ID NO: 1926 - RNA, 23 nt, Artificial Sequence
  Synthetic
cugaaagacuuccuggaaagccu

SEQ ID NO: 1927 - RNA, 23 nt, Artificial Sequence
  Synthetic
ugaaagacuuccuggaaagccua

SEQ ID NO: 1928 - RNA, 23 nt, Artificial Sequence
  Synthetic
gaaagacuuccuggaaagccuaa

SEQ ID NO: 1929 - RNA, 23 nt, Artificial Sequence
  Synthetic
aaagacuuccuggaaagccuaaa

SEQ ID NO: 1930 - RNA, 23 nt, Artificial Sequence
  Synthetic
aagacuuccuggaaagccuaaaa

SEQ ID NO: 1931 - RNA, 23 nt, Artificial Sequence
  Synthetic
agacuuccuggaaagccuaaaaa

SEQ ID NO: 1932 - RNA, 23 nt, Artificial Sequence
  Synthetic
ccuaaaaagcauccuacgaggga

SEQ ID NO: 1933 - RNA, 23 nt, Artificial Sequence
  Synthetic
accccaccugcuucucugacuac

SEQ ID NO: 1934 - RNA, 23 nt, Artificial Sequence
  Synthetic
cccaccugcuucucugacuacau

SEQ ID NO: 1935 - RNA, 23 nt, Artificial Sequence
  Synthetic
accugcuucucugacuacauccg

SEQ ID NO: 1936 - RNA, 23 nt, Artificial Sequence
  Synthetic
ccugcuucucugacuacauccgc

SEQ ID NO: 1937 - RNA, 23 nt, Artificial Sequence
  Synthetic
cugcuucucugacuacauccgca

SEQ ID NO: 1938 - RNA, 23 nt, Artificial Sequence
  Synthetic
ugcuucucugacuacauccgcac

SEQ ID NO: 1939 - RNA, 23 nt, Artificial Sequence
  Synthetic
gcuucucugacuacauccgcacu

SEQ ID NO: 1940 - RNA, 23 nt, Artificial Sequence
  Synthetic
ucucugaaaaccucacaugcacc

SEQ ID NO: 1941 - RNA, 23 nt, Artificial Sequence
  Synthetic
cuccagacaaccucacacuccac

SEQ ID NO: 1942 - RNA, 23 nt, Artificial Sequence
  Synthetic
ccagacaaccucacacuccacac

SEQ ID NO: 1943 - RNA, 23 nt, Artificial Sequence
  Synthetic
cagacaaccucacacuccacacc

SEQ ID NO: 1944 - RNA, 23 nt, Artificial Sequence
  Synthetic
acaaccucacacuccacaccaau

SEQ ID NO: 1945 - RNA, 23 nt, Artificial Sequence
  Synthetic
caaccucacacuccacaccaaug

SEQ ID NO: 1946 - RNA, 23 nt, Artificial Sequence
  Synthetic
aaccucacacuccacaccaaugu

SEQ ID NO: 1947 - RNA, 23 nt, Artificial Sequence
  Synthetic
accucacacuccacaccaauguc

SEQ ID NO: 1948 - RNA, 23 nt, Artificial Sequence
  Synthetic
ccucacacuccacaccaaugucu

SEQ ID NO: 1949 - RNA, 23 nt, Artificial Sequence
  Synthetic
uggucaacaucuccagagaggac

SEQ ID NO: 1950 - RNA, 23 nt, Artificial Sequence
  Synthetic
ggucaacaucuccagagaggaca

SEQ ID NO: 1951 - RNA, 23 nt, Artificial Sequence
  Synthetic
caacaucuccagagaggacaacc

SEQ ID NO: 1952 - RNA, 23 nt, Artificial Sequence
  Synthetic
aacaucuccagagaggacaaccc

SEQ ID NO: 1953 - RNA, 23 nt, Artificial Sequence
  Synthetic
aguggagucccagcaucacgugg

SEQ ID NO: 1954 - RNA, 23 nt, Artificial Sequence
  Synthetic
agcaucacgugguacaacccaaa

SEQ ID NO: 1955 - RNA, 23 nt, Artificial Sequence
  Synthetic
aagauauggugggaccagauucc

SEQ ID NO: 1956 - RNA, 23 nt, Artificial Sequence
  Synthetic
uccucuggccagagaacguucau

SEQ ID NO: 1957 - RNA, 23 nt, Artificial Sequence
  Synthetic
ccucuggccagagaacguucaug

SEQ ID NO: 1958 - RNA, 23 nt, Artificial Sequence
  Synthetic
ccaguacagaauguggaggagga

SEQ ID NO: 1959 - RNA, 23 nt, Artificial Sequence
  Synthetic
acagaauguggaggaggaagagg

SEQ ID NO: 1960 - RNA, 23 nt, Artificial Sequence
  Synthetic
ccugagcaugucaccugagaaca

SEQ ID NO: 1961 - RNA, 23 nt, Artificial Sequence
  Synthetic
gcugggggcugagaauggaggcg

SEQ ID NO: 1962 - RNA, 23 nt, Artificial Sequence
  Synthetic
caauccugccuaccggaguuuua

SEQ ID NO: 1963 - RNA, 23 nt, Artificial Sequence
  Synthetic
aauccugccuaccggaguuuuag

SEQ ID NO: 1964 - RNA, 23 nt, Artificial Sequence
  Synthetic
auccugccuaccggaguuuuagu

SEQ ID NO: 1965 - RNA, 23 nt, Artificial Sequence
  Synthetic
uccugccuaccggaguuuuagug

SEQ ID NO: 1966 - RNA, 23 nt, Artificial Sequence
  Synthetic
ccugccuaccggaguuuuaguga

SEQ ID NO: 1967 - RNA, 23 nt, Artificial Sequence
  Synthetic
gggagcagauccuucacaugagu

SEQ ID NO: 1968 - RNA, 23 nt, Artificial Sequence
  Synthetic
uccuucacaugaguguccugcag

SEQ ID NO: 1969 - RNA, 23 nt, Artificial Sequence
  Synthetic
aagaguuugugcaggcagugaag

SEQ ID NO: 1970 - RNA, 23 nt, Artificial Sequence
  Synthetic
cauuguguacucgucccucaccu

SEQ ID NO: 1971 - RNA, 23 nt, Artificial Sequence
  Synthetic
agggacucauuuugcuuucuccc

SEQ ID NO: 1972 - RNA, 23 nt, Artificial Sequence
  Synthetic
cucuuguugcccuaccugcucag

SEQ ID NO: 1973 - RNA, 23 nt, Artificial Sequence
  Synthetic
ucuccagcuggaagcugguccua

SEQ ID NO: 1974 - RNA, 23 nt, Artificial Sequence
  Synthetic
aaacuugauugcccaaagucacu

SEQ ID NO: 1975 - RNA, 23 nt, Artificial Sequence
  Synthetic
aacuugauugcccaaagucacug

SEQ ID NO: 1976 - RNA, 23 nt, Artificial Sequence
  Synthetic
acccacauguggccagaagccag

SEQ ID NO: 1977 - RNA, 23 nt, Artificial Sequence
  Synthetic
agugggaucccaguaaacaaaca

SEQ ID NO: 1978 - RNA, 23 nt, Artificial Sequence
  Synthetic
ggcagacugcagucugacugcau

SEQ ID NO: 1979 - RNA, 23 nt, Artificial Sequence
  Synthetic
gcagacugcagucugacugcauu

SEQ ID NO: 1980 - RNA, 23 nt, Artificial Sequence
  Synthetic
cagacugcagucugacugcauuc

SEQ ID NO: 1981 - DNA, 21 bp, Artificial Sequence
  Synthetic
  misc_feature (1)..(1): 5'-3 attached terminal deoxyabasic moeity
  misc_feature (1)..(1): 2'-deoxy-2'-Fluoro
  misc_feature (2)..(3): 2'-deoxy
  misc_feature (4)..(4): 2'-deoxy-2'-Fluoro
  misc_feature (5)..(6): 2'-deoxy
  misc_feature (7)..(7): 2'-deoxy-2'-Fluoro
  misc_feature (8)..(9): 2'-deoxy
  misc_feature (10)..(10): 2'-deoxy-2'-Fluoro
  misc_feature (11)..(11): 2'-deoxy
  misc_feature (12)..(12): 2'-deoxy-2'-Fluoro
  misc_feature (13)..(14): 2'-deoxy
  misc_feature (15)..(15): 2'-deoxy-2'-Fluoro
  misc_feature (16)..(16): 2'-deoxy
  misc_feature (17)..(17): 2'-deoxy-2'-Fluoro
  misc_feature (18)..(19): 2'-deoxy
  misc_feature (21)..(21): 3'-3 attached terminal deoxyabasic moeity
caacggcagcaugguauggtt

SEQ ID NO: 1982 - DNA, 21 bp, Artificial Sequence
  Synthetic
  misc_feature (1)..(1): 5'-3 attached terminal deoxyabasic moeity
  misc_feature (1)..(2): 2'-deoxy
  misc_feature (3)..(3): 2'-deoxy-2'-Fluoro
  misc_feature (4)..(5): 2'-deoxy
  misc_feature (6)..(6): 2'-deoxy-2'-Fluoro
  misc_feature (7)..(8): 2'-deoxy
  misc_feature (9)..(9): 2'-deoxy-2'-Fluoro
  misc_feature (10)..(10): 2'-deoxy
  misc_feature (11)..(11): 2'-deoxy-2'-Fluoro
  misc_feature (12)..(13): 2'-deoxy
  misc_feature (14)..(14): 2'-deoxy-2'-Fluoro
  misc_feature (15)..(15): 2'-deoxy
  misc_feature (16)..(16): 2'-deoxy-2'-Fluoro
  misc_feature (17)..(19): 2'-deoxy
  misc_feature (21)..(21): 3'-3 attached terminal deoxyabasic moeity
aacggcagcaugguauggatt

SEQ ID NO: 1983 - DNA, 21 bp, Artificial Sequence
  Synthetic
  misc_feature (1)..(1): 5'-3 attached terminal deoxyabasic moeity
  misc_feature (1)..(1): 2'-deoxy
  misc_feature (2)..(2): 2'-deoxy-2'-Fluoro
  misc_feature (3)..(4): 2'-deoxy
  misc_feature (5)..(5): 2'-deoxy-2'-Fluoro
  misc_feature (6)..(7): 2'-deoxy
  misc_feature (8)..(8): 2'-deoxy-2'-Fluoro
  misc_feature (9)..(9): 2'-deoxy
  misc_feature (10)..(10): 2'-deoxy-2'-Fluoro
  misc_feature (11)..(12): 2'-deoxy
  misc_feature (13)..(13): 2'-deoxy-2'-Fluoro
  misc_feature (14)..(14): 2'-deoxy
  misc_feature (15)..(15): 2'-deoxy-2'-Fluoro
  misc_feature (16)..(19): 2'-deoxy
  misc_feature (21)..(21): 3'-3 attached terminal deoxyabasic moeity
acggcagcaugguauggagtt

SEQ ID NO: 1984 - DNA, 21 bp, Artificial Sequence
  Synthetic
  misc_feature (1)..(1): 5'-3 attached terminal deoxyabasic moeity
  misc_feature (1)..(1): 2'-deoxy
  misc_feature (2)..(2): 2'-deoxy-2'-Fluoro
  misc_feature (3)..(4): 2'-deoxy
  misc_feature (5)..(6): 2'-deoxy-2'-Fluoro
  misc_feature (7)..(7): 2'-deoxy
  misc_feature (8)..(8): 2'-deoxy-2'-Fluoro
  misc_feature (9)..(9): 2'-deoxy
  misc_feature (10)..(10): 2'-deoxy-2'-Fluoro
  misc_feature (11)..(11): 2'-deoxy
  misc_feature (12)..(13): 2'-deoxy-2'-Fluoro
  misc_feature (14)..(14): 2'-deoxy
  misc_feature (15)..(17): 2'-deoxy-2'-Fluoro
  misc_feature (18)..(19): 2'-deoxy
  misc_feature (21)..(21): 3'-3 attached terminal deoxyabasic moeity
augguuguguguuauuuaatt

SEQ ID NO: 1985 - DNA, 21 bp, Artificial Sequence
  Synthetic
  misc_feature (1)..(1): 5'-3 attached terminal deoxyabasic moeity
  misc_feature (1)..(1): 2'-deoxy-2'-Fluoro
  misc_feature (2)..(3): 2'-deoxy
  misc_feature (4)..(5): 2'-deoxy-2'-Fluoro
  misc_feature (6)..(6): 2'-deoxy
  misc_feature (7)..(7): 2'-deoxy-2'-Fluoro
  misc_feature (8)..(8): 2'-deoxy
  misc_feature (9)..(9): 2'-deoxy-2'-Fluoro
  misc_feature (10)..(10): 2'-deoxy
  misc_feature (11)..(12): 2'-deoxy-2'-Fluoro
  misc_feature (13)..(13): 2'-deoxy
  misc_feature (14)..(16): 2'-deoxy-2'-Fluoro
  misc_feature (17)..(19): 2'-deoxy
  misc_feature (21)..(21): 3'-3 attached terminal deoxyabasic moeity
ugguuguguguuauuuaaatt

SEQ ID NO: 1986 - DNA, 21 bp, Artificial Sequence
  Synthetic
  misc_feature (1)..(1): 5'-3 attached terminal deoxyabasic moeity
  misc_feature (1)..(2): 2'-deoxy
  misc_feature (3)..(4): 2'-deoxy-2'-Fluoro
  misc_feature (5)..(5): 2'-deoxy
  misc_feature (6)..(6): 2'-deoxy-2'-Fluoro
  misc_feature (7)..(7): 2'-deoxy
  misc_feature (8)..(8): 2'-deoxy-2'-Fluoro
  misc_feature (9)..(9): 2'-deoxy
  misc_feature (10)..(11): 2'-deoxy-2'-Fluoro
  misc_feature (12)..(12): 2'-deoxy
  misc_feature (13)..(15): 2'-deoxy-2'-Fluoro
  misc_feature (16)..(18): 2'-deoxy
  misc_feature (19)..(19): 2'-deoxy-2'-Fluoro
  misc_feature (21)..(21): 3'-3 attached terminal deoxyabasic moeity
gguuguguguuauuuaaautt

SEQ ID NO: 1987 - DNA, 21 bp, Artificial Sequence
  Synthetic
  misc_feature (1)..(1): 5'-3 attached terminal deoxyabasic moeity
  misc_feature (1)..(1): 2'-deoxy
  misc_feature (2)..(3): 2'-deoxy-2'-Fluoro
  misc_feature (4)..(4): 2'-deoxy
  misc_feature (5)..(5): 2'-deoxy-2'-Fluoro
  misc_feature (6)..(6): 2'-deoxy
  misc_feature (7)..(7): 2'-deoxy-2'-Fluoro
  misc_feature (8)..(8): 2'-deoxy
  misc_feature (9)..(10): 2'-deoxy-2'-Fluoro
  misc_feature (11)..(11): 2'-deoxy
  misc_feature (12)..(14): 2'-deoxy-2'-Fluoro
  misc_feature (15)..(17): 2'-deoxy
  misc_feature (18)..(18): 2'-deoxy-2'-Fluoro
  misc_feature (19)..(19): 2'-deoxy
  misc_feature (21)..(21): 3'-3 attached terminal deoxyabasic moeity
guuguguguuauuuaaaugtt

SEQ ID NO: 1988 - DNA, 21 bp, Artificial Sequence
  Synthetic
  misc_feature (1)..(1): 5'-3 attached terminal deoxyabasic moeity
  misc_feature (1)..(1): 2'-deoxy-2'-Fluoro
  misc_feature (2)..(3): 2'-deoxy
  misc_feature (4)..(7): 2'-deoxy-2'-Fluoro
  misc_feature (8)..(8): 2'-deoxy
  misc_feature (9)..(10): 2'-deoxy-2'-Fluoro
  misc_feature (11)..(11): 2'-deoxy
  misc_feature (12)..(15): 2'-deoxy-2'-Fluoro
  misc_feature (16)..(16): 2'-deoxy
  misc_feature (17)..(18): 2'-deoxy-2'-Fluoro
  misc_feature (19)..(19): 2'-deoxy
  misc_feature (21)..(21): 3'-3 attached terminal deoxyabasic moeity
uaacucugcuaccucacugtt

SEQ ID NO: 1989 - DNA, 21 bp, Artificial Sequence
  Synthetic
  misc_feature (1)..(1): 5'-3 attached terminal deoxyabasic moeity
  misc_feature (1)..(1): 2'-deoxy-2'-Fluoro
  misc_feature (2)..(3): 2'-deoxy
  misc_feature (4)..(6): 2'-deoxy-2'-Fluoro
  misc_feature (7)..(8): 2'-deoxy
  misc_feature (9)..(9): 2'-deoxy-2'-Fluoro
  misc_feature (10)..(15): 2'-deoxy
  misc_feature (16)..(17): 2'-deoxy-2'-Fluoro
  misc_feature (18)..(19): 2'-deoxy
  misc_feature (21)..(21): 3'-3 attached terminal deoxyabasic moeity
uagcuuagcaaagaguuaatt

SEQ ID NO: 1990 - DNA, 21 bp, Artificial Sequence
  Synthetic
  misc_feature (1)..(1): 5'-3 attached terminal deoxyabasic moeity
  misc_feature (1)..(1): 2'-deoxy
  misc_feature (2)..(4): 2'-deoxy-2'-Fluoro
  misc_feature (5)..(6): 2'-deoxy
  misc_feature (7)..(7): 2'-deoxy-2'-Fluoro
  misc_feature (8)..(13): 2'-deoxy
  misc_feature (14)..(15): 2'-deoxy-2'-Fluoro
  misc_feature (16)..(17): 2'-deoxy
  misc_feature (18)..(18): 2'-deoxy-2'-Fluoro
  misc_feature (19)..(19): 2'-deoxy
  misc_feature (21)..(21): 3'-3 attached terminal deoxyabasic moeity
gcuuagcaaagaguuaauatt

SEQ ID NO: 1991 - DNA, 21 bp, Artificial Sequence
  Synthetic
  misc_feature (1)..(2): 2'-deoxy-2'-Fluoro
  misc_feature (3)..(3): 2'-O-methyl
  misc_feature (4)..(4): 2'-deoxy-2'-Fluoro
  misc_feature (5)..(5): 2'-O-methyl
  misc_feature (6)..(7): 2'-deoxy-2'-Fluoro
  misc_feature (8)..(8): 2'-O-methyl
  misc_feature (9)..(9): 2'-deoxy-2'-Fluoro
  misc_feature (10)..(10): 2'-O-methyl
  misc_feature (11)..(12): 2'-deoxy-2'-Fluoro
  misc_feature (13)..(13): 2'-O-methyl
  misc_feature (14)..(15): 2'-deoxy-2'-Fluoro
  misc_feature (16)..(16): 2'-O-methyl
  misc_feature (17)..(18): 2'-deoxy-2'-Fluoro
  misc_feature (19)..(19): 2'-O-methyl
  misc_feature (20)..(20): Phosphorothioate 3'-Internucleotide Linkage
ccauaccaugcugccguugtt

SEQ ID NO: 1992 - DNA, 21 bp, Artificial Sequence
  Synthetic
  misc_feature (1)..(3): 2'-deoxy-2'-Fluoro
  misc_feature (4)..(4): 2'-O-methyl
  misc_feature (5)..(5): 2'-deoxy-2'-Fluoro
  misc_feature (6)..(6): 2'-O-methyl
  misc_feature (7)..(8): 2'-deoxy-2'-Fluoro
  misc_feature (9)..(9): 2'-O-methyl
  misc_feature (10)..(10): 2'-deoxy-2'-Fluoro
  misc_feature (11)..(11): 2'-O-methyl
  misc_feature (12)..(13): 2'-deoxy-2'-Fluoro
  misc_feature (14)..(14): 2'-O-methyl
  misc_feature (15)..(16): 2'-deoxy-2'-Fluoro
  misc_feature (17)..(17): 2'-O-methyl
  misc_feature (18)..(19): 2'-deoxy-2'-Fluoro
  misc_feature (20)..(20): Phosphorothioate 3'-Internucleotide Linkage
uccauaccaugcugccguutt

SEQ ID NO: 1993 - DNA, 21 bp, Artificial Sequence
  Synthetic
  misc_feature (1)..(4): 2'-deoxy-2'-Fluoro
  misc_feature (5)..(5): 2'-O-methyl
  misc_feature (6)..(6): 2'-deoxy-2'-Fluoro
  misc_feature (7)..(7): 2'-O-methyl
  misc_feature (8)..(9): 2'-deoxy-2'-Fluoro
  misc_feature (10)..(10): 2'-O-methyl
  misc_feature (11)..(11): 2'-deoxy-2'-Fluoro
  misc_feature (12)..(12): 2'-O-methyl
  misc_feature (13)..(14): 2'-deoxy-2'-Fluoro
  misc_feature (15)..(15): 2'-O-methyl
  misc_feature (16)..(17): 2'-deoxy-2'-Fluoro
  misc_feature (18)..(18): 2'-O-methyl
  misc_feature (19)..(19): 2'-deoxy-2'-Fluoro
  misc_feature (20)..(20): Phosphorothioate 3'-Internucleotide Linkage
cuccauaccaugcugccgutt

SEQ ID NO: 1994 - DNA, 21 bp, Artificial Sequence
  Synthetic
  misc_feature (1)..(2): 2'-deoxy-2'-Fluoro
  misc_feature (3)..(5): 2'-O-methyl
  misc_feature (6)..(6): 2'-deoxy-2'-Fluoro
  misc_feature (7)..(8): 2'-O-methyl
  misc_feature (9)..(9): 2'-deoxy-2'-Fluoro
  misc_feature (10)..(10): 2'-O-methyl
  misc_feature (11)..(11): 2'-deoxy-2'-Fluoro
  misc_feature (12)..(12): 2'-O-methyl
  misc_feature (13)..(13): 2'-deoxy-2'-Fluoro
  misc_feature (14)..(15): 2'-O-methyl
  misc_feature (16)..(17): 2'-deoxy-2'-Fluoro
  misc_feature (18)..(18): 2'-O-methyl
  misc_feature (19)..(19): 2'-deoxy-2'-Fluoro
  misc_feature (20)..(20): Phosphorothioate 3'-Internucleotide Linkage
uuaaauaacacacaaccautt

SEQ ID NO: 1995 - DNA, 21 bp, Artificial Sequence
  Synthetic
  misc_feature (1)..(3): 2'-deoxy-2'-Fluoro
  misc_feature (4)..(6): 2'-O-methyl
  misc_feature (7)..(7): 2'-deoxy-2'-Fluoro
  misc_feature (8)..(9): 2'-O-methyl
  misc_feature (10)..(10): 2'-deoxy-2'-Fluoro
  misc_feature (11)..(11): 2'-O-methyl
  misc_feature (12)..(12): 2'-deoxy-2'-Fluoro
  misc_feature (13)..(13): 2'-O-methyl
  misc_feature (14)..(14): 2'-deoxy-2'-Fluoro
  misc_feature (15)..(16): 2'-O-methyl
  misc_feature (17)..(18): 2'-deoxy-2'-Fluoro
  misc_feature (19)..(19): 2'-O-methyl
  misc_feature (20)..(20): Phosphorothioate 3'-Internucleotide Linkage
uuuaaauaacacacaaccatt

SEQ ID NO: 1996 - DNA, 21 bp, Artificial Sequence
  Synthetic
  misc_feature (1)..(1): 2'-O-methyl
  misc_feature (2)..(4): 2'-deoxy-2'-Fluoro
  misc_feature (5)..(7): 2'-O-methyl
  misc_feature (8)..(8): 2'-deoxy-2'-Fluoro
  misc_feature (9)..(10): 2'-O-methyl
  misc_feature (11)..(11): 2'-deoxy-2'-Fluoro
  misc_feature (12)..(12): 2'-O-methyl
  misc_feature (13)..(13): 2'-deoxy-2'-Fluoro
  misc_feature (14)..(14): 2'-O-methyl
  misc_feature (15)..(15): 2'-deoxy-2'-Fluoro
  misc_feature (16)..(17): 2'-O-methyl
  misc_feature (18)..(19): 2'-deoxy-2'-Fluoro
  misc_feature (20)..(20): Phosphorothioate 3'-Internucleotide Linkage
auuuaaauaacacacaacctt

SEQ ID NO: 1997 - DNA, 21 bp, Artificial Sequence
  Synthetic
  misc_feature (1)..(1): 2'-deoxy-2'-Fluoro
  misc_feature (2)..(2): 2'-O-methyl
  misc_feature (3)..(5): 2'-deoxy-2'-Fluoro
  misc_feature (6)..(8): 2'-O-methyl
  misc_feature (9)..(9): 2'-deoxy-2'-Fluoro
  misc_feature (10)..(11): 2'-O-methyl
  misc_feature (12)..(12): 2'-deoxy-2'-Fluoro
  misc_feature (13)..(13): 2'-O-methyl
  misc_feature (14)..(14): 2'-deoxy-2'-Fluoro
  misc_feature (15)..(15): 2'-O-methyl
  misc_feature (16)..(16): 2'-deoxy-2'-Fluoro
  misc_feature (17)..(18): 2'-O-methyl
  misc_feature (19)..(19): 2'-deoxy-2'-Fluoro
  misc_feature (20)..(20): Phosphorothioate 3'-Internucleotide Linkage
cauuuaaauaacacacaactt

SEQ ID NO: 1998 - DNA, 21 bp, Artificial Sequence
  Synthetic
  misc_feature (1)..(1): 2'-deoxy-2'-Fluoro
  misc_feature (2)..(3): 2'-O-methyl
  misc_feature (4)..(4): 2'-deoxy-2'-Fluoro
  misc_feature (5)..(8): 2'-O-methyl
  misc_feature (9)..(9): 2'-deoxy-2'-Fluoro
  misc_feature (10)..(11): 2'-O-methyl
  misc_feature (12)..(12): 2'-deoxy-2'-Fluoro
  misc_feature (13)..(16): 2'-O-methyl
  misc_feature (17)..(18): 2'-deoxy-2'-Fluoro
  misc_feature (19)..(19): 2'-O-methyl
  misc_feature (20)..(20): Phosphorothioate 3'-Internucleotide Linkage
cagugagguagcagaguuatt

SEQ ID NO: 1999 - DNA, 21 bp, Artificial Sequence
  Synthetic
  misc_feature (1)..(2): 2'-deoxy-2'-Fluoro
  misc_feature (3)..(4): 2'-O-methyl
  misc_feature (5)..(10): 2'-deoxy-2'-Fluoro
  misc_feature (11)..(11): 2'-O-methyl
  misc_feature (12)..(13): 2'-deoxy-2'-Fluoro
  misc_feature (14)..(16): 2'-O-methyl
  misc_feature (17)..(18): 2'-deoxy-2'-Fluoro
  misc_feature (19)..(19): 2'-O-methyl
  misc_feature (20)..(20): Phosphorothioate 3'-Internucleotide Linkage
uuaacucuuugcuaagcuatt

SEQ ID NO: 2000 - DNA, 21 bp, Artificial Sequence
  Synthetic
  misc_feature (1)..(1): 2'-deoxy-2'-Fluoro
  misc_feature (2)..(2): 2'-O-methyl
  misc_feature (3)..(4): 2'-deoxy-2'-Fluoro
  misc_feature (5)..(6): 2'-O-methyl
  misc_feature (7)..(12): 2'-deoxy-2'-Fluoro
  misc_feature (13)..(13): 2'-O-methyl
  misc_feature (14)..(15): 2'-deoxy-2'-Fluoro
  misc_feature (16)..(18): 2'-O-methyl
  misc_feature (19)..(19): 2'-deoxy-2'-Fluoro
  misc_feature (20)..(20): Phosphorothioate 3'-Internucleotide Linkage
uauuaacucuuugcuaagctt

SEQ ID NO: 2001 - DNA, 21 bp, Artificial Sequence
  Synthetic
  misc_feature (1)..(1): 5'-3 attached terminal deoxyabasic moeity
  misc_feature (1)..(3): 2'-deoxy
  misc_feature (4)..(4): 2'-deoxy-2'-Fluoro
  misc_feature (5)..(6): 2'-deoxy
  misc_feature (7)..(8): 2'-deoxy-2'-Fluoro
  misc_feature (9)..(9): 2'-deoxy
  misc_feature (10)..(10): 2'-deoxy-2'-Fluoro
  misc_feature (11)..(12): 2'-deoxy
  misc_feature (13)..(16): 2'-deoxy-2'-Fluoro
  misc_feature (17)..(18): 2'-deoxy
  misc_feature (19)..(19): 2'-deoxy-2'-Fluoro
  misc_feature (21)..(21): 3'-3 attached terminal deoxyabasic moeity
gggugacugcaguccuggctt

SEQ ID NO: 2002 - DNA, 21 bp, Artificial Sequence
  Synthetic
  misc_feature (1)..(1): 5'-3 attached terminal deoxyabasic moeity
  misc_feature (1)..(1): 2'-deoxy-2'-Fluoro
  misc_feature (2)..(3): 2'-deoxy
  misc_feature (4)..(5): 2'-deoxy-2'-Fluoro
  misc_feature (6)..(6): 2'-deoxy
  misc_feature (7)..(7): 2'-deoxy-2'-Fluoro
  misc_feature (8)..(9): 2'-deoxy
  misc_feature (10)..(13): 2'-deoxy-2'-Fluoro
  misc_feature (14)..(15): 2'-deoxy
  misc_feature (16)..(19): 2'-deoxy-2'-Fluoro
  misc_feature (21)..(21): 3'-3 attached terminal deoxyabasic moeity
ugacugcaguccuggcucutt

SEQ ID NO: 2003 - DNA, 21 bp, Artificial Sequence
  Synthetic
  misc_feature (1)..(1): 5'-3 attached terminal deoxyabasic moeity
  misc_feature (1)..(2): 2'-deoxy
  misc_feature (3)..(4): 2'-deoxy-2'-Fluoro
  misc_feature (5)..(5): 2'-deoxy
  misc_feature (6)..(6): 2'-deoxy-2'-Fluoro
  misc_feature (7)..(8): 2'-deoxy
  misc_feature (9)..(12): 2'-deoxy-2'-Fluoro
  misc_feature (13)..(14): 2'-deoxy
  misc_feature (15)..(19): 2'-deoxy-2'-Fluoro
  misc_feature (21)..(21): 3'-3 attached terminal deoxyabasic moeity
gacugcaguccuggcucuctt

SEQ ID NO: 2004 - DNA, 21 bp, Artificial Sequence
  Synthetic
  misc_feature (1)..(1): 5'-3 attached terminal deoxyabasic moeity
  misc_feature (1)..(1): 2'-deoxy
  misc_feature (2)..(3): 2'-deoxy-2'-Fluoro
  misc_feature (4)..(4): 2'-deoxy
  misc_feature (5)..(5): 2'-deoxy-2'-Fluoro
  misc_feature (6)..(7): 2'-deoxy
  misc_feature (8)..(11): 2'-deoxy-2'-Fluoro
  misc_feature (12)..(13): 2'-deoxy
  misc_feature (14)..(18): 2'-deoxy-2'-Fluoro
  misc_feature (19)..(19): 2'-deoxy
  misc_feature (21)..(21): 3'-3 attached terminal deoxyabasic moeity
acugcaguccuggcucucgtt

SEQ ID NO: 2005 - DNA, 21 bp, Artificial Sequence
  Synthetic
  misc_feature (1)..(1): 5'-3 attached terminal deoxyabasic moeity
  misc_feature (1)..(2): 2'-deoxy-2'-Fluoro
  misc_feature (3)..(3): 2'-deoxy
  misc_feature (4)..(4): 2'-deoxy-2'-Fluoro
  misc_feature (5)..(6): 2'-deoxy
  misc_feature (7)..(10): 2'-deoxy-2'-Fluoro
  misc_feature (11)..(12): 2'-deoxy
  misc_feature (13)..(17): 2'-deoxy-2'-Fluoro
  misc_feature (18)..(18): 2'-deoxy
  misc_feature (19)..(19): 2'-deoxy-2'-Fluoro
  misc_feature (21)..(21): 3'-3 attached terminal deoxyabasic moeity
cugcaguccuggcucucgctt

SEQ ID NO: 2006 - DNA, 21 bp, Artificial Sequence
  Synthetic
  misc_feature (1)..(1): 5'-3 attached terminal deoxyabasic moeity
  misc_feature (1)..(1): 2'-deoxy-2'-Fluoro
  misc_feature (2)..(7): 2'-deoxy
  misc_feature (8)..(10): 2'-deoxy-2'-Fluoro
  misc_feature (11)..(11): 2'-deoxy
  misc_feature (12)..(13): 2'-deoxy-2'-Fluoro
  misc_feature (14)..(19): 2'-deoxy
  misc_feature (21)..(21): 3'-3 attached terminal deoxyabasic moeity
cagggagcuuaucgaggagtt

SEQ ID NO: 2007 - DNA, 21 bp, Artificial Sequence
  Synthetic
  misc_feature (1)..(1): 5'-3 attached terminal deoxyabasic moeity
  misc_feature (1)..(5): 2'-deoxy
  misc_feature (6)..(7): 2'-deoxy-2'-Fluoro
  misc_feature (8)..(10): 2'-deoxy
  misc_feature (11)..(11): 2'-deoxy-2'-Fluoro
  misc_feature (12)..(13): 2'-deoxy
  misc_feature (14)..(14): 2'-deoxy-2'-Fluoro
  misc_feature (15)..(15): 2'-deoxy
  misc_feature (16)..(17): 2'-deoxy-2'-Fluoro
  misc_feature (18)..(18): 2'-deoxy
  misc_feature (19)..(19): 2'-deoxy-2'-Fluoro
  misc_feature (21)..(21): 3'-3 attached terminal deoxyabasic moeity
aggagcugagcaacaucactt

SEQ ID NO: 2008 - DNA, 21 bp, Artificial Sequence
  Synthetic
  misc_feature (1)..(1): 5'-3 attached terminal deoxyabasic moeity
  misc_feature (1)..(4): 2'-deoxy
  misc_feature (5)..(6): 2'-deoxy-2'-Fluoro
  misc_feature (7)..(9): 2'-deoxy
  misc_feature (10)..(10): 2'-deoxy-2'-Fluoro
  misc_feature (11)..(12): 2'-deoxy
  misc_feature (13)..(13): 2'-deoxy-2'-Fluoro
  misc_feature (14)..(14): 2'-deoxy
  misc_feature (15)..(16): 2'-deoxy-2'-Fluoro
  misc_feature (17)..(17): 2'-deoxy
  misc_feature (18)..(18): 2'-deoxy-2'-Fluoro
  misc_feature (19)..(19): 2'-deoxy
  misc_feature (21)..(21): 3'-3 attached terminal deoxyabasic moeity
ggagcugagcaacaucacatt

SEQ ID NO: 2009 - DNA, 21 bp, Artificial Sequence
  Synthetic
  misc_feature (1)..(1): 5'-3 attached terminal deoxyabasic moeity
  misc_feature (1)..(3): 2'-deoxy
  misc_feature (4)..(5): 2'-deoxy-2'-Fluoro
  misc_feature (6)..(8): 2'-deoxy
  misc_feature (9)..(9): 2'-deoxy-2'-Fluoro
  misc_feature (10)..(11): 2'-deoxy
  misc_feature (12)..(12): 2'-deoxy-2'-Fluoro
  misc_feature (13)..(13): 2'-deoxy
  misc_feature (14)..(15): 2'-deoxy-2'-Fluoro
  misc_feature (16)..(16): 2'-deoxy
  misc_feature (17)..(17): 2'-deoxy-2'-Fluoro
  misc_feature (18)..(18): 2'-deoxy
  misc_feature (19)..(19): 2'-deoxy-2'-Fluoro
  misc_feature (21)..(21): 3'-3 attached terminal deoxyabasic moeity
gagcugagcaacaucacactt

SEQ ID NO: 2010 - DNA, 21 bp, Artificial Sequence
  Synthetic
  misc_feature (1)..(1): 5'-3 attached terminal deoxyabasic moeity
  misc_feature (1)..(2): 2'-deoxy
  misc_feature (3)..(4): 2'-deoxy-2'-Fluoro
  misc_feature (5)..(7): 2'-deoxy
  misc_feature (8)..(8): 2'-deoxy-2'-Fluoro
  misc_feature (9)..(10): 2'-deoxy
  misc_feature (11)..(11): 2'-deoxy-2'-Fluoro
  misc_feature (12)..(12): 2'-deoxy
  misc_feature (13)..(14): 2'-deoxy-2'-Fluoro
  misc_feature (15)..(15): 2'-deoxy
  misc_feature (16)..(16): 2'-deoxy-2'-Fluoro
  misc_feature (17)..(17): 2'-deoxy
  misc_feature (18)..(18): 2'-deoxy-2'-Fluoro
  misc_feature (19)..(19): 2'-deoxy
  misc_feature (21)..(21): 3'-3 attached terminal deoxyabasic moeity
agcugagcaacaucacacatt

SEQ ID NO: 2011 - DNA, 21 bp, Artificial Sequence
  Synthetic
  misc_feature (1)..(1): 5'-3 attached terminal deoxyabasic moeity
  misc_feature (1)..(1): 2'-deoxy
  misc_feature (2)..(3): 2'-deoxy-2'-Fluoro
  misc_feature (4)..(6): 2'-deoxy
  misc_feature (7)..(7): 2'-deoxy-2'-Fluoro
  misc_feature (8)..(9): 2'-deoxy
  misc_feature (10)..(10): 2'-deoxy-2'-Fluoro
  misc_feature (11)..(11): 2'-deoxy
  misc_feature (12)..(13): 2'-deoxy-2'-Fluoro
  misc_feature (14)..(14): 2'-deoxy
  misc_feature (15)..(15): 2'-deoxy-2'-Fluoro
  misc_feature (16)..(16): 2'-deoxy
  misc_feature (17)..(17): 2'-deoxy-2'-Fluoro
  misc_feature (18)..(19): 2'-deoxy
  misc_feature (21)..(21): 3'-3 attached terminal deoxyabasic moeity
gcugagcaacaucacacaatt

SEQ ID NO: 2012 - DNA, 21 bp, Artificial Sequence
  Synthetic
  misc_feature (1)..(1): 5'-3 attached terminal deoxyabasic moeity
  misc_feature (1)..(3): 2'-deoxy
  misc_feature (4)..(4): 2'-deoxy-2'-Fluoro
  misc_feature (5)..(6): 2'-deoxy
  misc_feature (7)..(7): 2'-deoxy-2'-Fluoro
  misc_feature (8)..(8): 2'-deoxy
  misc_feature (9)..(10): 2'-deoxy-2'-Fluoro
  misc_feature (11)..(11): 2'-deoxy
  misc_feature (12)..(12): 2'-deoxy-2'-Fluoro
  misc_feature (13)..(13): 2'-deoxy
  misc_feature (14)..(14): 2'-deoxy-2'-Fluoro
  misc_feature (15)..(18): 2'-deoxy
  misc_feature (19)..(19): 2'-deoxy-2'-Fluoro
  misc_feature (21)..(21): 3'-3 attached terminal deoxyabasic moeity
gagcaacaucacacaagactt

SEQ ID NO: 2013 - DNA, 21 bp, Artificial Sequence
  Synthetic
  misc_feature (1)..(1): 5'-3 attached terminal deoxyabasic moeity
  misc_feature (1)..(2): 2'-deoxy
  misc_feature (3)..(3): 2'-deoxy-2'-Fluoro
  misc_feature (4)..(5): 2'-deoxy
  misc_feature (6)..(6): 2'-deoxy-2'-Fluoro
  misc_feature (7)..(7): 2'-deoxy
  misc_feature (8)..(9): 2'-deoxy-2'-Fluoro
  misc_feature (10)..(10): 2'-deoxy
  misc_feature (11)..(11): 2'-deoxy-2'-Fluoro
  misc_feature (12)..(12): 2'-deoxy
  misc_feature (13)..(13): 2'-deoxy-2'-Fluoro
  misc_feature (14)..(17): 2'-deoxy
  misc_feature (18)..(19): 2'-deoxy-2'-Fluoro
  misc_feature (21)..(21): 3'-3 attached terminal deoxyabasic moeity
agcaacaucacacaagacctt

SEQ ID NO: 2014 - DNA, 21 bp, Artificial Sequence
  Synthetic
  misc_feature (1)..(1): 5'-3 attached terminal deoxyabasic moeity
  misc_feature (1)..(1): 2'-deoxy
  misc_feature (2)..(2): 2'-deoxy-2'-Fluoro
  misc_feature (3)..(4): 2'-deoxy
  misc_feature (5)..(5): 2'-deoxy-2'-Fluoro
  misc_feature (6)..(6): 2'-deoxy
  misc_feature (7)..(8): 2'-deoxy-2'-Fluoro
  misc_feature (9)..(9): 2'-deoxy
  misc_feature (10)..(10): 2'-deoxy-2'-Fluoro
  misc_feature (11)..(11): 2'-deoxy
  misc_feature (12)..(12): 2'-deoxy-2'-Fluoro
  misc_feature (13)..(16): 2'-deoxy
  misc_feature (17)..(18): 2'-deoxy-2'-Fluoro
  misc_feature (19)..(19): 2'-deoxy
  misc_feature (21)..(21): 3'-3 attached terminal deoxyabasic moeity
gcaacaucacacaagaccatt

SEQ ID NO: 2015 - DNA, 21 bp, Artificial Sequence
  Synthetic
  misc_feature (1)..(1): 5'-3 attached terminal deoxyabasic moeity
  misc_feature (1)..(1): 2'-deoxy-2'-Fluoro
  misc_feature (2)..(3): 2'-deoxy
  misc_feature (4)..(4): 2'-deoxy-2'-Fluoro
  misc_feature (5)..(5): 2'-deoxy
  misc_feature (6)..(7): 2'-deoxy-2'-Fluoro
  misc_feature (8)..(8): 2'-deoxy
  misc_feature (9)..(9): 2'-deoxy-2'-Fluoro
  misc_feature (10)..(10): 2'-deoxy
  misc_feature (11)..(11): 2'-deoxy-2'-Fluoro
  misc_feature (12)..(15): 2'-deoxy
  misc_feature (16)..(17): 2'-deoxy-2'-Fluoro
  misc_feature (18)..(19): 2'-deoxy
  misc_feature (21)..(21): 3'-3 attached terminal deoxyabasic moeity
caacaucacacaagaccagtt

SEQ ID NO: 2016 - DNA, 21 bp, Artificial Sequence
  Synthetic
  misc_feature (1)..(1): 5'-3 attached terminal deoxyabasic moeity
  misc_feature (1)..(2): 2'-deoxy
  misc_feature (3)..(3): 2'-deoxy-2'-Fluoro
  misc_feature (4)..(4): 2'-deoxy
  misc_feature (5)..(6): 2'-deoxy-2'-Fluoro
  misc_feature (7)..(7): 2'-deoxy
  misc_feature (8)..(8): 2'-deoxy-2'-Fluoro
  misc_feature (9)..(9): 2'-deoxy
  misc_feature (10)..(10): 2'-deoxy-2'-Fluoro
  misc_feature (11)..(14): 2'-deoxy
  misc_feature (15)..(16): 2'-deoxy-2'-Fluoro
  misc_feature (17)..(19): 2'-deoxy
  misc_feature (21)..(21): 3'-3 attached terminal deoxyabasic moeity
aacaucacacaagaccagatt

SEQ ID NO: 2017 - DNA, 21 bp, Artificial Sequence
  Synthetic
  misc_feature (1)..(1): 5'-3 attached terminal deoxyabasic moeity
  misc_feature (1)..(5): 2'-deoxy
  misc_feature (6)..(12): 2'-deoxy-2'-Fluoro
  misc_feature (13)..(13): 2'-deoxy
  misc_feature (14)..(14): 2'-deoxy-2'-Fluoro
  misc_feature (15)..(15): 2'-deoxy
  misc_feature (16)..(16): 2'-deoxy-2'-Fluoro
  misc_feature (17)..(18): 2'-deoxy
  misc_feature (19)..(19): 2'-deoxy-2'-Fluoro
  misc_feature (21)..(21): 3'-3 attached terminal deoxyabasic moeity
gaagacuucccugugcaactt

SEQ ID NO: 2018 - DNA, 21 bp, Artificial Sequence
  Synthetic
  misc_feature (1)..(1): 5'-3 attached terminal deoxyabasic moeity
  misc_feature (1)..(1): 2'-deoxy-2'-Fluoro
  misc_feature (2)..(3): 2'-deoxy
  misc_feature (4)..(4): 2'-deoxy-2'-Fluoro
  misc_feature (5)..(6): 2'-deoxy
  misc_feature (7)..(7): 2'-deoxy-2'-Fluoro
  misc_feature (8)..(8): 2'-deoxy
  misc_feature (9)..(9): 2'-deoxy-2'-Fluoro
  misc_feature (10)..(11): 2'-deoxy
  misc_feature (12)..(12): 2'-deoxy-2'-Fluoro
  misc_feature (13)..(13): 2'-deoxy
  misc_feature (14)..(14): 2'-deoxy-2'-Fluoro
  misc_feature (15)..(18): 2'-deoxy
  misc_feature (19)..(19): 2'-deoxy-2'-Fluoro
  misc_feature (21)..(21): 3'-3 attached terminal deoxyabasic moeity
cagcagcaugguauggagctt

SEQ ID NO: 2019 - DNA, 21 bp, Artificial Sequence
  Synthetic
  misc_feature (1)..(1): 5'-3 attached terminal deoxyabasic moeity
  misc_feature (1)..(1): 2'-deoxy-2'-Fluoro
  misc_feature (2)..(3): 2'-deoxy
  misc_feature (4)..(5): 2'-deoxy-2'-Fluoro
  misc_feature (6)..(7): 2'-deoxy
  misc_feature (8)..(8): 2'-deoxy-2'-Fluoro
  misc_feature (9)..(11): 2'-deoxy
  misc_feature (12)..(15): 2'-deoxy-2'-Fluoro
  misc_feature (16)..(16): 2'-deoxy
  misc_feature (17)..(17): 2'-deoxy-2'-Fluoro
  misc_feature (18)..(18): 2'-deoxy
  misc_feature (19)..(19): 2'-deoxy-2'-Fluoro
  misc_feature (21)..(21): 3'-3 attached terminal deoxyabasic moeity
cagcuggcggguucugugctt

SEQ ID NO: 2020 - DNA, 21 bp, Artificial Sequence
  Synthetic
  misc_feature (1)..(1): 5'-3 attached terminal deoxyabasic moeity
  misc_feature (1)..(5): 2'-deoxy-2'-Fluoro
  misc_feature (6)..(7): 2'-deoxy
  misc_feature (8)..(9): 2'-deoxy-2'-Fluoro
  misc_feature (10)..(11): 2'-deoxy
  misc_feature (12)..(12): 2'-deoxy-2'-Fluoro
  misc_feature (13)..(13): 2'-deoxy
  misc_feature (14)..(18): 2'-deoxy-2'-Fluoro
  misc_feature (19)..(19): 2'-deoxy
  misc_feature (21)..(21): 3'-3 attached terminal deoxyabasic moeity
ucccugaccaacaucuccatt

SEQ ID NO: 2021 - DNA, 21 bp, Artificial Sequence
  Synthetic
  misc_feature (1)..(1): 5'-3 attached terminal deoxyabasic moeity
  misc_feature (1)..(2): 2'-deoxy-2'-Fluoro
  misc_feature (3)..(3): 2'-deoxy
  misc_feature (4)..(4): 2'-deoxy-2'-Fluoro
  misc_feature (5)..(6): 2'-deoxy
  misc_feature (7)..(7): 2'-deoxy-2'-Fluoro
  misc_feature (8)..(8): 2'-deoxy
  misc_feature (9)..(10): 2'-deoxy-2'-Fluoro
  misc_feature (11)..(11): 2'-deoxy
  misc_feature (12)..(14): 2'-deoxy-2'-Fluoro
  misc_feature (15)..(15): 2'-deoxy
  misc_feature (16)..(16): 2'-deoxy-2'-Fluoro
  misc_feature (17)..(19): 2'-deoxy
  misc_feature (21)..(21): 3'-3 attached terminal deoxyabasic moeity
uugcaaugccauccacaggtt

SEQ ID NO: 2022 - DNA, 21 bp, Artificial Sequence
  Synthetic
  misc_feature (1)..(1): 5'-3 attached terminal deoxyabasic moeity
  misc_feature (1)..(1): 2'-deoxy-2'-Fluoro
  misc_feature (2)..(5): 2'-deoxy
  misc_feature (6)..(8): 2'-deoxy-2'-Fluoro
  misc_feature (9)..(14): 2'-deoxy
  misc_feature (15)..(15): 2'-deoxy-2'-Fluoro
  misc_feature (16)..(16): 2'-deoxy
  misc_feature (17)..(18): 2'-deoxy-2'-Fluoro
  misc_feature (19)..(19): 2'-deoxy
  misc_feature (21)..(21): 3'-3 attached terminal deoxyabasic moeity
caggacccagaggauauugtt

SEQ ID NO: 2023 - DNA, 21 bp, Artificial Sequence
  Synthetic
  misc_feature (1)..(1): 5'-3 attached terminal deoxyabasic moeity
  misc_feature (1)..(2): 2'-deoxy
  misc_feature (3)..(3): 2'-deoxy-2'-Fluoro
  misc_feature (4)..(4): 2'-deoxy
  misc_feature (5)..(6): 2'-deoxy-2'-Fluoro
  misc_feature (7)..(10): 2'-deoxy
  misc_feature (11)..(12): 2'-deoxy-2'-Fluoro
  misc_feature (13)..(16): 2'-deoxy
  misc_feature (17)..(17): 2'-deoxy-2'-Fluoro
  misc_feature (18)..(19): 2'-deoxy
  misc_feature (21)..(21): 3'-3 attached terminal deoxyabasic moeity
gauaccaaaaucgaaguagtt

SEQ ID NO: 2024 - DNA, 21 bp, Artificial Sequence
  Synthetic
  misc_feature (1)..(1): 5'-3 attached terminal deoxyabasic moeity
  misc_feature (1)..(1): 2'-deoxy
  misc_feature (2)..(2): 2'-deoxy-2'-Fluoro
  misc_feature (3)..(3): 2'-deoxy
  misc_feature (4)..(5): 2'-deoxy-2'-Fluoro
  misc_feature (6)..(9): 2'-deoxy
  misc_feature (10)..(11): 2'-deoxy-2'-Fluoro
  misc_feature (12)..(15): 2'-deoxy
  misc_feature (16)..(16): 2'-deoxy-2'-Fluoro
  misc_feature (17)..(18): 2'-deoxy
  misc_feature (19)..(19): 2'-deoxy-2'-Fluoro
  misc_feature (21)..(21): 3'-3 attached terminal deoxyabasic moeity
auaccaaaaucgaaguagctt

SEQ ID NO: 2025 - DNA, 21 bp, Artificial Sequence
  Synthetic
  misc_feature (1)..(1): 5'-3 attached terminal deoxyabasic moeity
  misc_feature (1)..(1): 2'-deoxy-2'-Fluoro
  misc_feature (2)..(2): 2'-deoxy
  misc_feature (3)..(4): 2'-deoxy-2'-Fluoro
  misc_feature (5)..(8): 2'-deoxy
  misc_feature (9)..(10): 2'-deoxy-2'-Fluoro
  misc_feature (11)..(14): 2'-deoxy
  misc_feature (15)..(15): 2'-deoxy-2'-Fluoro
  misc_feature (16)..(17): 2'-deoxy
  misc_feature (18)..(19): 2'-deoxy-2'-Fluoro
  misc_feature (21)..(21): 3'-3 attached terminal deoxyabasic moeity
uaccaaaaucgaaguagcctt

SEQ ID NO: 2026 - DNA, 21 bp, Artificial Sequence
  Synthetic
  misc_feature (1)..(1): 5'-3 attached terminal deoxyabasic moeity
  misc_feature (1)..(1): 2'-deoxy
  misc_feature (2)..(3): 2'-deoxy-2'-Fluoro
  misc_feature (4)..(7): 2'-deoxy
  misc_feature (8)..(9): 2'-deoxy-2'-Fluoro
  misc_feature (10)..(13): 2'-deoxy
  misc_feature (14)..(14): 2'-deoxy-2'-Fluoro
  misc_feature (15)..(16): 2'-deoxy
  misc_feature (17)..(19): 2'-deoxy-2'-Fluoro
  misc_feature (21)..(21): 3'-3 attached terminal deoxyabasic moeity
accaaaaucgaaguagccctt

SEQ ID NO: 2027 - DNA, 21 bp, Artificial Sequence
  Synthetic
  misc_feature (1)..(1): 5'-3 attached terminal deoxyabasic moeity
  misc_feature (1)..(2): 2'-deoxy-2'-Fluoro
  misc_feature (3)..(6): 2'-deoxy
  misc_feature (7)..(8): 2'-deoxy-2'-Fluoro
  misc_feature (9)..(12): 2'-deoxy
  misc_feature (13)..(13): 2'-deoxy-2'-Fluoro
  misc_feature (14)..(15): 2'-deoxy
  misc_feature (16)..(18): 2'-deoxy-2'-Fluoro
  misc_feature (19)..(19): 2'-deoxy
  misc_feature (21)..(21): 3'-3 attached terminal deoxyabasic moeity
ccaaaaucgaaguagcccatt

SEQ ID NO: 2028 - DNA, 21 bp, Artificial Sequence
  Synthetic
  misc_feature (1)..(1): 5'-3 attached terminal deoxyabasic moeity
  misc_feature (1)..(1): 2'-deoxy-2'-Fluoro
  misc_feature (4)..(5): 2'-deoxy-2'-Fluoro
  misc_feature (7)..(10): 2'-deoxy-2'-Fluoro
  misc_feature (14)..(14): 2'-deoxy-2'-Fluoro
  misc_feature (17)..(19): 2'-deoxy-2'-Fluoro
  misc_feature (21)..(21): 3'-3 attached terminal deoxyabasic moeity
caauuacuccaagcaacuutt

SEQ ID NO: 2029 - DNA, 21 bp, Artificial Sequence
  Synthetic
  misc_feature (1)..(1): 5'-3 attached terminal deoxyabasic moeity
  misc_feature (1)..(2): 2'-deoxy
  misc_feature (3)..(4): 2'-deoxy-2'-Fluoro
  misc_feature (5)..(5): 2'-deoxy
  misc_feature (6)..(9): 2'-deoxy-2'-Fluoro
  misc_feature (10)..(12): 2'-deoxy
  misc_feature (13)..(13): 2'-deoxy-2'-Fluoro
  misc_feature (14)..(15): 2'-deoxy
  misc_feature (16)..(19): 2'-deoxy-2'-Fluoro
  misc_feature (21)..(21): 3'-3 attached terminal deoxyabasic moeity
aauuacuccaagcaacuuutt

SEQ ID NO: 2030 - DNA, 21 bp, Artificial Sequence
  Synthetic
  misc_feature (1)..(1): 5'-3 attached terminal deoxyabasic moeity
  misc_feature (1)..(1): 2'-deoxy
  misc_feature (2)..(3): 2'-deoxy-2'-Fluoro
  misc_feature (4)..(4): 2'-deoxy
  misc_feature (5)..(8): 2'-deoxy-2'-Fluoro
  misc_feature (9)..(11): 2'-deoxy
  misc_feature (12)..(12): 2'-deoxy-2'-Fluoro
  misc_feature (13)..(14): 2'-deoxy
  misc_feature (15)..(19): 2'-deoxy-2'-Fluoro
  misc_feature (21)..(21): 3'-3 attached terminal deoxyabasic moeity
auuacuccaagcaacuuuutt

SEQ ID NO: 2031 - DNA, 21 bp, Artificial Sequence
  Synthetic
  misc_feature (1)..(1): 5'-3 attached terminal deoxyabasic moeity
  misc_feature (1)..(1): 2'-deoxy
  misc_feature (2)..(8): 2'-deoxy-2'-Fluoro
  misc_feature (9)..(9): 2'-deoxy
  misc_feature (10)..(11): 2'-deoxy-2'-Fluoro
  misc_feature (12)..(12): 2'-deoxy
  misc_feature (13)..(13): 2'-deoxy-2'-Fluoro
  misc_feature (14)..(15): 2'-deoxy
  misc_feature (16)..(17): 2'-deoxy-2'-Fluoro
  misc_feature (18)..(18): 2'-deoxy
  misc_feature (19)..(19): 2'-deoxy-2'-Fluoro
  misc_feature (21)..(21): 3'-3 attached terminal deoxyabasic moeity
acuuuuccgcuauggccactt

SEQ ID NO: 2032 - DNA, 21 bp, Artificial Sequence
  Synthetic
  misc_feature (1)..(1): 5'-3 attached terminal deoxyabasic moeity
  misc_feature (1)..(1): 2'-deoxy-2'-Fluoro
  misc_feature (2)..(3): 2'-deoxy
  misc_feature (4)..(5): 2'-deoxy-2'-Fluoro
  misc_feature (6)..(6): 2'-deoxy
  misc_feature (7)..(7): 2'-deoxy-2'-Fluoro
  misc_feature (8)..(10): 2'-deoxy
  misc_feature (11)..(14): 2'-deoxy-2'-Fluoro
  misc_feature (15)..(16): 2'-deoxy
  misc_feature (17)..(18): 2'-deoxy-2'-Fluoro
  misc_feature (19)..(19): 2'-deoxy
  misc_feature (21)..(21): 3'-3 attached terminal deoxyabasic moeity
cagcuguggaccucaguugtt

SEQ ID NO: 2033 - DNA, 21 bp, Artificial Sequence
  Synthetic
  misc_feature (1)..(1): 2'-O-methyl
  misc_feature (4)..(7): 2'-O-methyl
  misc_feature (8)..(9): 2'-deoxy-2'-Fluoro
  misc_feature (10)..(10): 2'-O-methyl
  misc_feature (11)..(11): 2'-deoxy-2'-Fluoro
  misc_feature (12)..(13): 2'-O-methyl
  misc_feature (14)..(15): 2'-deoxy-2'-Fluoro
  misc_feature (16)..(16): 2'-O-methyl
  misc_feature (17)..(19): 2'-deoxy-2'-Fluoro
gccaggacugcagucaccctt

SEQ ID NO: 2034 - DNA, 21 bp, Artificial Sequence
  Synthetic
  misc_feature (1)..(4): 2'-O-methyl
  misc_feature (5)..(6): 2'-deoxy-2'-Fluoro
  misc_feature (7)..(10): 2'-O-methyl
  misc_feature (11)..(12): 2'-deoxy-2'-Fluoro
  misc_feature (13)..(13): 2'-O-methyl
  misc_feature (14)..(14): 2'-deoxy-2'-Fluoro
  misc_feature (15)..(16): 2'-O-methyl
  misc_feature (17)..(18): 2'-deoxy-2'-Fluoro
  misc_feature (19)..(19): 2'-O-methyl
agagccaggacugcagucatt

SEQ ID NO: 2035 - DNA, 21 bp, Artificial Sequence
  Synthetic
  misc_feature (1)..(5): 2'-O-methyl
  misc_feature (6)..(7): 2'-deoxy-2'-Fluoro
  misc_feature (8)..(11): 2'-O-methyl
  misc_feature (12)..(13): 2'-deoxy-2'-Fluoro
  misc_feature (14)..(14): 2'-O-methyl
  misc_feature (15)..(15): 2'-deoxy-2'-Fluoro
  misc_feature (16)..(17): 2'-O-methyl
  misc_feature (18)..(19): 2'-deoxy-2'-Fluoro
gagagccaggacugcaguctt

SEQ ID NO: 2036 - DNA, 21 bp, Artificial Sequence
  Synthetic
  misc_feature (2)..(6): 2'-O-methyl
  misc_feature (7)..(8): 2'-deoxy-2'-Fluoro
  misc_feature (9)..(12): 2'-O-methyl
  misc_feature (13)..(14): 2'-deoxy-2'-Fluoro
  misc_feature (15)..(15): 2'-O-methyl
  misc_feature (16)..(16): 2'-deoxy-2'-Fluoro
  misc_feature (17)..(18): 2'-O-methyl
  misc_feature (19)..(19): 2'-deoxy-2'-Fluoro
cgagagccaggacugcagutt

SEQ ID NO: 2037 - DNA, 21 bp, Artificial Sequence
  Synthetic
  misc_feature (1)..(1): 2'-O-methyl
  misc_feature (3)..(7): 2'-O-methyl
  misc_feature (8)..(9): 2'-deoxy-2'-Fluoro
  misc_feature (10)..(13): 2'-O-methyl
  misc_feature (14)..(15): 2'-deoxy-2'-Fluoro
  misc_feature (16)..(16): 2'-O-methyl
  misc_feature (17)..(17): 2'-deoxy-2'-Fluoro
  misc_feature (18)..(19): 2'-O-methyl
gcgagagccaggacugcagtt

SEQ ID NO: 2038 - DNA, 21 bp, Artificial Sequence
  Synthetic
  misc_feature (4)..(6): 2'-deoxy-2'-Fluoro
  misc_feature (7)..(8): 2'-O-methyl
  misc_feature (9)..(9): 2'-deoxy-2'-Fluoro
  misc_feature (10)..(12): 2'-O-methyl
  misc_feature (13)..(18): 2'-deoxy-2'-Fluoro
  misc_feature (19)..(19): 2'-O-methyl
cuccucgauaagcucccugtt

SEQ ID NO: 2039 - DNA, 21 bp, Artificial Sequence
  Synthetic
  misc_feature (1)..(1): 2'-O-methyl
  misc_feature (3)..(4): 2'-O-methyl
  misc_feature (5)..(5): 2'-deoxy-2'-Fluoro
  misc_feature (6)..(6): 2'-O-methyl
  misc_feature (7)..(8): 2'-deoxy-2'-Fluoro
  misc_feature (9)..(9): 2'-O-methyl
  misc_feature (10)..(12): 2'-deoxy-2'-Fluoro
  misc_feature (13)..(14): 2'-O-methyl
  misc_feature (15)..(19): 2'-deoxy-2'-Fluoro
gugauguugcucagcuccutt

SEQ ID NO: 2040 - DNA, 21 bp, Artificial Sequence
  Synthetic
  misc_feature (2)..(2): 2'-O-methyl
  misc_feature (4)..(5): 2'-O-methyl
  misc_feature (6)..(6): 2'-deoxy-2'-Fluoro
  misc_feature (7)..(7): 2'-O-methyl
  misc_feature (8)..(9): 2'-deoxy-2'-Fluoro
  misc_feature (10)..(10): 2'-O-methyl
  misc_feature (11)..(13): 2'-deoxy-2'-Fluoro
  misc_feature (14)..(15): 2'-O-methyl
  misc_feature (16)..(19): 2'-deoxy-2'-Fluoro
ugugauguugcucagcucctt

SEQ ID NO: 2041 - DNA, 21 bp, Artificial Sequence
  Synthetic
  misc_feature (1)..(1): 2'-O-methyl
  misc_feature (3)..(3): 2'-O-methyl
  misc_feature (4)..(4): 2'-deoxy-2'-Fluoro
  misc_feature (5)..(6): 2'-O-methyl
  misc_feature (7)..(7): 2'-deoxy-2'-Fluoro
  misc_feature (8)..(8): 2'-O-methyl
  misc_feature (9)..(10): 2'-deoxy-2'-Fluoro
  misc_feature (11)..(11): 2'-O-methyl
  misc_feature (12)..(14): 2'-deoxy-2'-Fluoro
  misc_feature (15)..(16): 2'-O-methyl
  misc_feature (17)..(19): 2'-deoxy-2'-Fluoro
gugugauguugcucagcuctt

SEQ ID NO: 2042 - DNA, 21 bp, Artificial Sequence
  Synthetic
  misc_feature (2)..(2): 2'-O-methyl
  misc_feature (4)..(4): 2'-O-methyl
  misc_feature (5)..(5): 2'-deoxy-2'-Fluoro
  misc_feature (6)..(7): 2'-O-methyl
  misc_feature (8)..(8): 2'-deoxy-2'-Fluoro
  misc_feature (9)..(9): 2'-O-methyl
  misc_feature (10)..(11): 2'-deoxy-2'-Fluoro
  misc_feature (12)..(12): 2'-O-methyl
  misc_feature (13)..(15): 2'-deoxy-2'-Fluoro
  misc_feature (16)..(17): 2'-O-methyl
  misc_feature (18)..(19): 2'-deoxy-2'-Fluoro
ugugugauguugcucagcutt

SEQ ID NO: 2043 - DNA, 21 bp, Artificial Sequence
  Synthetic
  misc_feature (3)..(3): 2'-O-methyl
  misc_feature (4)..(4): 2'-deoxy-2'-Fluoro
  misc_feature (5)..(5): 2'-O-methyl
  misc_feature (6)..(6): 2'-deoxy-2'-Fluoro
  misc_feature (7)..(8): 2'-O-methyl
  misc_feature (9)..(9): 2'-deoxy-2'-Fluoro
  misc_feature (10)..(10): 2'-O-methyl
  misc_feature (11)..(12): 2'-deoxy-2'-Fluoro
  misc_feature (13)..(13): 2'-O-methyl
  misc_feature (14)..(16): 2'-deoxy-2'-Fluoro
  misc_feature (17)..(18): 2'-O-methyl
  misc_feature (19)..(19): 2'-deoxy-2'-Fluoro
uugugugauguugcucagctt

SEQ ID NO: 2044 - DNA, 21 bp, Artificial Sequence
  Synthetic
  misc_feature (1)..(1): 2'-O-methyl
  misc_feature (4)..(5): 2'-deoxy-2'-Fluoro
  misc_feature (6)..(6): 2'-O-methyl
  misc_feature (7)..(7): 2'-deoxy-2'-Fluoro
  misc_feature (8)..(8): 2'-O-methyl
  misc_feature (9)..(9): 2'-deoxy-2'-Fluoro
  misc_feature (10)..(11): 2'-O-methyl
  misc_feature (12)..(12): 2'-deoxy-2'-Fluoro
  misc_feature (13)..(13): 2'-O-methyl
  misc_feature (14)..(15): 2'-deoxy-2'-Fluoro
  misc_feature (16)..(16): 2'-O-methyl
  misc_feature (17)..(19): 2'-deoxy-2'-Fluoro
gucuugugugauguugcuctt

SEQ ID NO: 2045 - DNA, 21 bp, Artificial Sequence
  Synthetic
  misc_feature (1)..(2): 2'-O-methyl
  misc_feature (4)..(6): 2'-deoxy-2'-Fluoro
  misc_feature (7)..(7): 2'-O-methyl
  misc_feature (8)..(8): 2'-deoxy-2'-Fluoro
  misc_feature (9)..(9): 2'-O-methyl
  misc_feature (10)..(10): 2'-deoxy-2'-Fluoro
  misc_feature (11)..(12): 2'-O-methyl
  misc_feature (13)..(13): 2'-deoxy-2'-Fluoro
  misc_feature (14)..(14): 2'-O-methyl
  misc_feature (15)..(16): 2'-deoxy-2'-Fluoro
  misc_feature (17)..(17): 2'-O-methyl
  misc_feature (18)..(19): 2'-deoxy-2'-Fluoro
ggucuugugugauguugcutt

SEQ ID NO: 2046 - DNA, 21 bp, Artificial Sequence
  Synthetic
  misc_feature (2)..(3): 2'-O-methyl
  misc_feature (4)..(7): 2'-deoxy-2'-Fluoro
  misc_feature (8)..(8): 2'-O-methyl
  misc_feature (9)..(9): 2'-deoxy-2'-Fluoro
  misc_feature (10)..(10): 2'-O-methyl
  misc_feature (11)..(11): 2'-deoxy-2'-Fluoro
  misc_feature (12)..(13): 2'-O-methyl
  misc_feature (14)..(14): 2'-deoxy-2'-Fluoro
  misc_feature (15)..(15): 2'-O-methyl
  misc_feature (16)..(17): 2'-deoxy-2'-Fluoro
  misc_feature (18)..(18): 2'-O-methyl
  misc_feature (19)..(19): 2'-deoxy-2'-Fluoro
uggucuugugugauguugctt

SEQ ID NO: 2047 - DNA, 21 bp, Artificial Sequence
  Synthetic
  misc_feature (3)..(4): 2'-O-methyl
  misc_feature (5)..(8): 2'-deoxy-2'-Fluoro
  misc_feature (9)..(9): 2'-O-methyl
  misc_feature (10)..(10): 2'-deoxy-2'-Fluoro
  misc_feature (11)..(11): 2'-O-methyl
  misc_feature (12)..(12): 2'-deoxy-2'-Fluoro
  misc_feature (13)..(14): 2'-O-methyl
  misc_feature (15)..(15): 2'-deoxy-2'-Fluoro
  misc_feature (16)..(16): 2'-O-methyl
  misc_feature (17)..(18): 2'-deoxy-2'-Fluoro
  misc_feature (19)..(19): 2'-O-methyl
cuggucuugugugauguugtt

SEQ ID NO: 2048 - DNA, 21 bp, Artificial Sequence
  Synthetic
  misc_feature (4)..(5): 2'-O-methyl
  misc_feature (6)..(9): 2'-deoxy-2'-Fluoro
  misc_feature (10)..(10): 2'-O-methyl
  misc_feature (11)..(11): 2'-deoxy-2'-Fluoro
  misc_feature (12)..(12): 2'-O-methyl
  misc_feature (13)..(13): 2'-deoxy-2'-Fluoro
  misc_feature (14)..(15): 2'-O-methyl
  misc_feature (16)..(16): 2'-deoxy-2'-Fluoro
  misc_feature (17)..(17): 2'-O-methyl
  misc_feature (18)..(19): 2'-deoxy-2'-Fluoro
ucuggucuugugugauguutt

SEQ ID NO: 2049 - DNA, 21 bp, Artificial Sequence
  Synthetic
  misc_feature (1)..(1): 2'-O-methyl
  misc_feature (4)..(4): 2'-O-methyl
  misc_feature (5)..(5): 2'-deoxy-2'-Fluoro
  misc_feature (6)..(6): 2'-O-methyl
  misc_feature (7)..(7): 2'-deoxy-2'-Fluoro
  misc_feature (8)..(14): 2'-O-methyl
  misc_feature (15)..(19): 2'-deoxy-2'-Fluoro
guugcacagggaagucuuctt

SEQ ID NO: 2050 - DNA, 21 bp, Artificial Sequence
  Synthetic
  misc_feature (1)..(1): 2'-O-methyl
  misc_feature (4)..(5): 2'-deoxy-2'-Fluoro
  misc_feature (6)..(6): 2'-O-methyl
  misc_feature (7)..(7): 2'-deoxy-2'-Fluoro
  misc_feature (8)..(8): 2'-O-methyl
  misc_feature (9)..(10): 2'-deoxy-2'-Fluoro
  misc_feature (11)..(11): 2'-O-methyl
  misc_feature (12)..(12): 2'-deoxy-2'-Fluoro
  misc_feature (13)..(13): 2'-O-methyl
  misc_feature (14)..(15): 2'-deoxy-2'-Fluoro
  misc_feature (16)..(16): 2'-O-methyl
  misc_feature (17)..(18): 2'-deoxy-2'-Fluoro
  misc_feature (19)..(19): 2'-O-methyl
gcuccauaccaugcugcugtt

SEQ ID NO: 2051 - DNA, 21 bp, Artificial Sequence
  Synthetic
  misc_feature (1)..(1): 2'-O-methyl
  misc_feature (3)..(3): 2'-O-methyl
  misc_feature (4)..(4): 2'-deoxy-2'-Fluoro
  misc_feature (5)..(8): 2'-O-methyl
  misc_feature (9)..(11): 2'-deoxy-2'-Fluoro
  misc_feature (12)..(12): 2'-O-methyl
  misc_feature (13)..(14): 2'-deoxy-2'-Fluoro
  misc_feature (15)..(16): 2'-O-methyl
  misc_feature (17)..(18): 2'-deoxy-2'-Fluoro
  misc_feature (19)..(19): 2'-O-methyl
gcacagaacccgccagcugtt

SEQ ID NO: 2052 - DNA, 21 bp, Artificial Sequence
  Synthetic
  misc_feature (2)..(6): 2'-O-methyl
  misc_feature (7)..(7): 2'-deoxy-2'-Fluoro
  misc_feature (8)..(8): 2'-O-methyl
  misc_feature (9)..(10): 2'-deoxy-2'-Fluoro
  misc_feature (11)..(12): 2'-O-methyl
  misc_feature (13)..(14): 2'-deoxy-2'-Fluoro
  misc_feature (15)..(19): 2'-O-methyl
uggagauguuggucagggatt

SEQ ID NO: 2053 - DNA, 21 bp, Artificial Sequence
  Synthetic
  misc_feature (4)..(4): 2'-O-methyl
  misc_feature (5)..(5): 2'-deoxy-2'-Fluoro
  misc_feature (6)..(8): 2'-O-methyl
  misc_feature (9)..(9): 2'-deoxy-2'-Fluoro
  misc_feature (10)..(11): 2'-O-methyl
  misc_feature (12)..(12): 2'-deoxy-2'-Fluoro
  misc_feature (13)..(13): 2'-O-methyl
  misc_feature (14)..(15): 2'-deoxy-2'-Fluoro
  misc_feature (16)..(16): 2'-O-methyl
  misc_feature (17)..(17): 2'-deoxy-2'-Fluoro
  misc_feature (18)..(19): 2'-O-methyl
ccuguggauggcauugcaatt

SEQ ID NO: 2054 - DNA, 21 bp, Artificial Sequence
  Synthetic
  misc_feature (2)..(3): 2'-O-methyl
  misc_feature (4)..(4): 2'-deoxy-2'-Fluoro
  misc_feature (5)..(5): 2'-O-methyl
  misc_feature (6)..(11): 2'-deoxy-2'-Fluoro
  misc_feature (12)..(14): 2'-O-methyl
  misc_feature (15)..(18): 2'-deoxy-2'-Fluoro
  misc_feature (19)..(19): 2'-O-methyl
caauauccucuggguccugtt

SEQ ID NO: 2055 - DNA, 21 bp, Artificial Sequence
  Synthetic
  misc_feature (3)..(3): 2'-O-methyl
  misc_feature (4)..(7): 2'-deoxy-2'-Fluoro
  misc_feature (8)..(9): 2'-O-methyl
  misc_feature (10)..(13): 2'-deoxy-2'-Fluoro
  misc_feature (14)..(15): 2'-O-methyl
  misc_feature (16)..(16): 2'-deoxy-2'-Fluoro
  misc_feature (17)..(17): 2'-O-methyl
  misc_feature (18)..(19): 2'-deoxy-2'-Fluoro
cuacuucgauuuugguauctt

SEQ ID NO: 2056 - DNA, 21 bp, Artificial Sequence
  Synthetic
  misc_feature (1)..(1): 2'-O-methyl
  misc_feature (4)..(4): 2'-O-methyl
  misc_feature (5)..(8): 2'-deoxy-2'-Fluoro
  misc_feature (9)..(10): 2'-O-methyl
  misc_feature (11)..(14): 2'-deoxy-2'-Fluoro
  misc_feature (15)..(16): 2'-O-methyl
  misc_feature (17)..(17): 2'-deoxy-2'-Fluoro
  misc_feature (18)..(18): 2'-O-methyl
  misc_feature (19)..(19): 2'-deoxy-2'-Fluoro
gcuacuucgauuuugguautt

SEQ ID NO: 2057 - DNA, 21 bp, Artificial Sequence
  Synthetic
  misc_feature (1)..(2): 2'-O-methyl
  misc_feature (4)..(4): 2'-deoxy-2'-Fluoro
  misc_feature (5)..(5): 2'-O-methyl
  misc_feature (6)..(9): 2'-deoxy-2'-Fluoro
  misc_feature (10)..(11): 2'-O-methyl
  misc_feature (12)..(15): 2'-deoxy-2'-Fluoro
  misc_feature (16)..(17): 2'-O-methyl
  misc_feature (18)..(18): 2'-deoxy-2'-Fluoro
  misc_feature (19)..(19): 2'-O-methyl
ggcuacuucgauuuugguatt

SEQ ID NO: 2058 - DNA, 21 bp, Artificial Sequence
  Synthetic
  misc_feature (1)..(3): 2'-O-methyl
  misc_feature (4)..(5): 2'-deoxy-2'-Fluoro
  misc_feature (6)..(6): 2'-O-methyl
  misc_feature (7)..(10): 2'-deoxy-2'-Fluoro
  misc_feature (11)..(12): 2'-O-methyl
  misc_feature (13)..(16): 2'-deoxy-2'-Fluoro
  misc_feature (17)..(18): 2'-O-methyl
  misc_feature (19)..(19): 2'-deoxy-2'-Fluoro
gggcuacuucgauuuuggutt

SEQ ID NO: 2059 - DNA, 21 bp, Artificial Sequence
  Synthetic
  misc_feature (2)..(4): 2'-O-methyl
  misc_feature (5)..(6): 2'-deoxy-2'-Fluoro
  misc_feature (7)..(7): 2'-O-methyl
  misc_feature (8)..(11): 2'-deoxy-2'-Fluoro
  misc_feature (12)..(13): 2'-O-methyl
  misc_feature (14)..(17): 2'-deoxy-2'-Fluoro
  misc_feature (18)..(19): 2'-O-methyl
ugggcuacuucgauuuuggtt

SEQ ID NO: 2060 - DNA, 21 bp, Artificial Sequence
  Synthetic
  misc_feature (1)..(3): 2'-O-methyl
  misc_feature (4)..(5): 2'-deoxy-2'-Fluoro
  misc_feature (6)..(6): 2'-O-methyl
  misc_feature (7)..(9): 2'-deoxy-2'-Fluoro
  misc_feature (10)..(13): 2'-O-methyl
  misc_feature (14)..(14): 2'-deoxy-2'-Fluoro
  misc_feature (15)..(16): 2'-O-methyl
  misc_feature (17)..(18): 2'-deoxy-2'-Fluoro
  misc_feature (19)..(19): 2'-O-methyl
aaguugcuuggaguaauugtt

SEQ ID NO: 2061 - DNA, 21 bp, Artificial Sequence
  Synthetic
  misc_feature (1)..(4): 2'-O-methyl
  misc_feature (5)..(6): 2'-deoxy-2'-Fluoro
  misc_feature (7)..(7): 2'-O-methyl
  misc_feature (8)..(10): 2'-deoxy-2'-Fluoro
  misc_feature (11)..(14): 2'-O-methyl
  misc_feature (15)..(15): 2'-deoxy-2'-Fluoro
  misc_feature (16)..(17): 2'-O-methyl
  misc_feature (18)..(19): 2'-deoxy-2'-Fluoro
aaaguugcuuggaguaauutt

SEQ ID NO: 2062 - DNA, 21 bp, Artificial Sequence
  Synthetic
  misc_feature (1)..(5): 2'-O-methyl
  misc_feature (6)..(7): 2'-deoxy-2'-Fluoro
  misc_feature (8)..(8): 2'-O-methyl
  misc_feature (9)..(11): 2'-deoxy-2'-Fluoro
  misc_feature (12)..(15): 2'-O-methyl
  misc_feature (16)..(16): 2'-deoxy-2'-Fluoro
  misc_feature (17)..(18): 2'-O-methyl
  misc_feature (19)..(19): 2'-deoxy-2'-Fluoro
aaaaguugcuuggaguaautt

SEQ ID NO: 2063 - DNA, 21 bp, Artificial Sequence
  Synthetic
  misc_feature (1)..(1): 2'-O-methyl
  misc_feature (3)..(4): 2'-O-methyl
  misc_feature (5)..(6): 2'-deoxy-2'-Fluoro
  misc_feature (7)..(7): 2'-O-methyl
  misc_feature (8)..(8): 2'-deoxy-2'-Fluoro
  misc_feature (9)..(10): 2'-O-methyl
  misc_feature (11)..(11): 2'-deoxy-2'-Fluoro
  misc_feature (12)..(18): 2'-O-methyl
  misc_feature (19)..(19): 2'-deoxy-2'-Fluoro
guggccauagcggaaaagutt

SEQ ID NO: 2064 - DNA, 21 bp, Artificial Sequence
  Synthetic
  misc_feature (2)..(3): 2'-O-methyl
  misc_feature (4)..(5): 2'-deoxy-2'-Fluoro
  misc_feature (6)..(9): 2'-O-methyl
  misc_feature (10)..(12): 2'-deoxy-2'-Fluoro
  misc_feature (13)..(13): 2'-O-methyl
  misc_feature (14)..(14): 2'-deoxy-2'-Fluoro
  misc_feature (15)..(16): 2'-O-methyl
  misc_feature (17)..(18): 2'-deoxy-2'-Fluoro
  misc_feature (19)..(19): 2'-O-methyl
caacugagguccacagcugtt

SEQ ID NO: 2065 - DNA, 21 bp, Artificial Sequence
  Synthetic
gcaacaucacacaagaccatt

SEQ ID NO: 2066 - DNA, 21 bp, Artificial Sequence
  Synthetic
uggucuugugugauguugctt

SEQ ID NO: 2067 - DNA, 21 bp, Artificial Sequence
  Synthetic
gagcaacaucacacaagactt

SEQ ID NO: 2068 - DNA, 21 bp, Artificial Sequence
  Synthetic
uaccaaaaucgaaguagcctt

SEQ ID NO: 2069 - DNA, 21 bp, Artificial Sequence
  Synthetic
ccaaaaucgaaguagcccatt

SEQ ID NO: 2070 - DNA, 21 bp, Artificial Sequence
  Synthetic
gucuugugugauguugcuctt

SEQ ID NO: 2071 - DNA, 21 bp, Artificial Sequence
  Synthetic
ggcuacuucgauuuugguatt

SEQ ID NO: 2072 - DNA, 21 bp, Artificial Sequence
  Synthetic
ugggcuacuucgauuuuggtt

SEQ ID NO: 2073 - DNA, 21 bp, Artificial Sequence
  Synthetic
  misc_feature (1)..(1): 5'-3 attached terminal deoxyabasic moeity
  misc_feature (1)..(1): 2'-deoxy-2'-Fluoro
  misc_feature (2)..(2): 2'-deoxy
  misc_feature (3)..(3): 2'-deoxy-2'-Fluoro
  misc_feature (4)..(8): 2'-deoxy
  misc_feature (9)..(11): 2'-deoxy-2'-Fluoro
  misc_feature (12)..(13): 2'-deoxy
  misc_feature (14)..(15): 2'-deoxy-2'-Fluoro
  misc_feature (16)..(16): 2'-deoxy
  misc_feature (17)..(19): 2'-deoxy-2'-Fluoro
  misc_feature (21)..(21): 3'-3 attached terminal deoxyabasic moeity
cacagaaguucagccaccutt

SEQ ID NO: 2074 - DNA, 21 bp, Artificial Sequence
  Synthetic
  misc_feature (1)..(1): 5'-3 attached terminal deoxyabasic moeity
  misc_feature (1)..(1): 2'-deoxy-2'-Fluoro
  misc_feature (2)..(6): 2'-deoxy
  misc_feature (7)..(9): 2'-deoxy-2'-Fluoro
  misc_feature (10)..(11): 2'-deoxy
  misc_feature (12)..(13): 2'-deoxy-2'-Fluoro
  misc_feature (14)..(14): 2'-deoxy
  misc_feature (15)..(17): 2'-deoxy-2'-Fluoro
  misc_feature (18)..(18): 2'-deoxy
  misc_feature (19)..(19): 2'-deoxy-2'-Fluoro
  misc_feature (21)..(21): 3'-3 attached terminal deoxyabasic moeity
cagaaguucagccaccugutt

SEQ ID NO: 2075 - DNA, 21 bp, Artificial Sequence
  Synthetic
  misc_feature (1)..(1): 5'-3 attached terminal deoxyabasic moeity
  misc_feature (1)..(5): 2'-deoxy
  misc_feature (6)..(8): 2'-deoxy-2'-Fluoro
  misc_feature (9)..(10): 2'-deoxy
  misc_feature (11)..(12): 2'-deoxy-2'-Fluoro
  misc_feature (13)..(13): 2'-deoxy
  misc_feature (14)..(16): 2'-deoxy-2'-Fluoro
  misc_feature (17)..(17): 2'-deoxy
  misc_feature (18)..(18): 2'-deoxy-2'-Fluoro
  misc_feature (19)..(19): 2'-deoxy
  misc_feature (21)..(21): 3'-3 attached terminal deoxyabasic moeity
agaaguucagccaccugugtt

SEQ ID NO: 2076 - DNA, 21 bp, Artificial Sequence
  Synthetic
  misc_feature (1)..(1): 5'-3 attached terminal deoxyabasic moeity
  misc_feature (1)..(2): 2'-deoxy-2'-Fluoro
  misc_feature (3)..(3): 2'-deoxy
  misc_feature (4)..(6): 2'-deoxy-2'-Fluoro
  misc_feature (7)..(7): 2'-deoxy
  misc_feature (8)..(8): 2'-deoxy-2'-Fluoro
  misc_feature (9)..(10): 2'-deoxy
  misc_feature (11)..(11): 2'-deoxy-2'-Fluoro
  misc_feature (12)..(14): 2'-deoxy
  misc_feature (15)..(17): 2'-deoxy-2'-Fluoro
  misc_feature (18)..(19): 2'-deoxy
  misc_feature (21)..(21): 3'-3 attached terminal deoxyabasic moeity
ccaccugugacgaauuugatt

SEQ ID NO: 2077 - DNA, 21 bp, Artificial Sequence
  Synthetic
  misc_feature (1)..(1): 5'-3 attached terminal deoxyabasic moeity
  misc_feature (1)..(2): 2'-deoxy-2'-Fluoro
  misc_feature (3)..(3): 2'-deoxy
  misc_feature (4)..(5): 2'-deoxy-2'-Fluoro
  misc_feature (6)..(10): 2'-deoxy
  misc_feature (11)..(15): 2'-deoxy-2'-Fluoro
  misc_feature (16)..(16): 2'-deoxy
  misc_feature (17)..(17): 2'-deoxy-2'-Fluoro
  misc_feature (18)..(18): 2'-deoxy
  misc_feature (19)..(19): 2'-deoxy-2'-Fluoro
  misc_feature (21)..(21): 3'-3 attached terminal deoxyabasic moeity
cugucgaaaaucucugcactt

SEQ ID NO: 2078 - DNA, 21 bp, Artificial Sequence
  Synthetic
  misc_feature (1)..(1): 5'-3 attached terminal deoxyabasic moeity
  misc_feature (1)..(4): 2'-deoxy
  misc_feature (5)..(5): 2'-deoxy-2'-Fluoro
  misc_feature (6)..(11): 2'-deoxy
  misc_feature (12)..(14): 2'-deoxy-2'-Fluoro
  misc_feature (15)..(16): 2'-deoxy
  misc_feature (17)..(19): 2'-deoxy-2'-Fluoro
  misc_feature (21)..(21): 3'-3 attached terminal deoxyabasic moeity
aaagugagaagccuagccctt

SEQ ID NO: 2079 - DNA, 21 bp, Artificial Sequence
  Synthetic
  misc_feature (1)..(1): 5'-3 attached terminal deoxyabasic moeity
  misc_feature (1)..(1): 2'-deoxy-2'-Fluoro
  misc_feature (2)..(7): 2'-deoxy
  misc_feature (8)..(10): 2'-deoxy-2'-Fluoro
  misc_feature (11)..(12): 2'-deoxy
  misc_feature (13)..(18): 2'-deoxy-2'-Fluoro
  misc_feature (19)..(19): 2'-deoxy
  misc_feature (21)..(21): 3'-3 attached terminal deoxyabasic moeity
ugagaagccuagcccuuugtt

SEQ ID NO: 2080 - DNA, 21 bp, Artificial Sequence
  Synthetic
  misc_feature (1)..(1): 5'-3 attached terminal deoxyabasic moeity
  misc_feature (1)..(4): 2'-deoxy
  misc_feature (5)..(7): 2'-deoxy-2'-Fluoro
  misc_feature (8)..(9): 2'-deoxy
  misc_feature (10)..(15): 2'-deoxy-2'-Fluoro
  misc_feature (16)..(17): 2'-deoxy
  misc_feature (18)..(18): 2'-deoxy-2'-Fluoro
  misc_feature (19)..(19): 2'-deoxy
  misc_feature (21)..(21): 3'-3 attached terminal deoxyabasic moeity
gaagccuagcccuuuggugtt

SEQ ID NO: 2081 - DNA, 21 bp, Artificial Sequence
  Synthetic
  misc_feature (1)..(1): 5'-3 attached terminal deoxyabasic moeity
  misc_feature (1)..(1): 2'-deoxy-2'-Fluoro
  misc_feature (2)..(3): 2'-deoxy
  misc_feature (4)..(9): 2'-deoxy-2'-Fluoro
  misc_feature (10)..(11): 2'-deoxy
  misc_feature (12)..(12): 2'-deoxy-2'-Fluoro
  misc_feature (13)..(19): 2'-deoxy
  misc_feature (21)..(21): 3'-3 attached terminal deoxyabasic moeity
uagcccuuuggugaaaaagtt

SEQ ID NO: 2082 - DNA, 21 bp, Artificial Sequence
  Synthetic
  misc_feature (1)..(1): 5'-3 attached terminal deoxyabasic moeity
  misc_feature (1)..(3): 2'-deoxy-2'-Fluoro
  misc_feature (4)..(5): 2'-deoxy
  misc_feature (6)..(6): 2'-deoxy-2'-Fluoro
  misc_feature (7)..(13): 2'-deoxy
  misc_feature (14)..(14): 2'-deoxy-2'-Fluoro
  misc_feature (15)..(15): 2'-deoxy
  misc_feature (16)..(16): 2'-deoxy-2'-Fluoro
  misc_feature (17)..(17): 2'-deoxy
  misc_feature (18)..(19): 2'-deoxy-2'-Fluoro
  misc_feature (21)..(21): 3'-3 attached terminal deoxyabasic moeity
uuuggugaaaaagugcauctt

SEQ ID NO: 2083 - DNA, 21 bp, Artificial Sequence
  Synthetic
  misc_feature (1)..(1): 5'-3 attached terminal deoxyabasic moeity
  misc_feature (1)..(2): 2'-deoxy-2'-Fluoro
  misc_feature (5)..(5): 2'-deoxy-2'-Fluoro
  misc_feature (13)..(13): 2'-deoxy-2'-Fluoro
  misc_feature (15)..(15): 2'-deoxy-2'-Fluoro
  misc_feature (17)..(19): 2'-deoxy-2'-Fluoro
  misc_feature (21)..(21): 3'-3 attached terminal deoxyabasic moeity
uuggugaaaaagugcaucutt

SEQ ID NO: 2084 - DNA, 21 bp, Artificial Sequence
  Synthetic
  misc_feature (1)..(1): 5'-3 attached terminal deoxyabasic moeity
  misc_feature (1)..(2): 2'-deoxy
  misc_feature (3)..(3): 2'-deoxy-2'-Fluoro
  misc_feature (4)..(10): 2'-deoxy
  misc_feature (11)..(11): 2'-deoxy-2'-Fluoro
  misc_feature (12)..(12): 2'-deoxy
  misc_feature (13)..(13): 2'-deoxy-2'-Fluoro
  misc_feature (14)..(14): 2'-deoxy
  misc_feature (15)..(18): 2'-deoxy-2'-Fluoro
  misc_feature (19)..(19): 2'-deoxy
  misc_feature (21)..(21): 3'-3 attached terminal deoxyabasic moeity
ggugaaaaagugcaucucatt

SEQ ID NO: 2085 - DNA, 21 bp, Artificial Sequence
  Synthetic
  misc_feature (1)..(1): 5'-3 attached terminal deoxyabasic moeity
  misc_feature (1)..(1): 2'-deoxy
  misc_feature (2)..(3): 2'-deoxy-2'-Fluoro
  misc_feature (4)..(4): 2'-deoxy
  misc_feature (5)..(5): 2'-deoxy-2'-Fluoro
  misc_feature (6)..(7): 2'-deoxy
  misc_feature (8)..(8): 2'-deoxy-2'-Fluoro
  misc_feature (9)..(9): 2'-deoxy
  misc_feature (10)..(10): 2'-deoxy-2'-Fluoro
  misc_feature (11)..(11): 2'-deoxy
  misc_feature (12)..(14): 2'-deoxy-2'-Fluoro
  misc_feature (15)..(16): 2'-deoxy
  misc_feature (17)..(17): 2'-deoxy-2'-Fluoro
  misc_feature (18)..(18): 2'-deoxy
  misc_feature (19)..(19): 2'-deoxy-2'-Fluoro
  misc_feature (21)..(21): 3'-3 attached terminal deoxyabasic moeity
acugcagugcacuuggcactt

SEQ ID NO: 2086 - DNA, 21 bp, Artificial Sequence
  Synthetic
  misc_feature (1)..(1): 5'-3 attached terminal deoxyabasic moeity
  misc_feature (1)..(2): 2'-deoxy
  misc_feature (3)..(3): 2'-deoxy-2'-Fluoro
  misc_feature (4)..(4): 2'-deoxy
  misc_feature (5)..(5): 2'-deoxy-2'-Fluoro
  misc_feature (6)..(6): 2'-deoxy
  misc_feature (7)..(9): 2'-deoxy-2'-Fluoro
  misc_feature (10)..(11): 2'-deoxy
  misc_feature (12)..(12): 2'-deoxy-2'-Fluoro
  misc_feature (13)..(13): 2'-deoxy
  misc_feature (14)..(14): 2'-deoxy-2'-Fluoro
  misc_feature (15)..(16): 2'-deoxy
  misc_feature (17)..(19): 2'-deoxy-2'-Fluoro
  misc_feature (21)..(21): 3'-3 attached terminal deoxyabasic moeity
agugcacuuggcacaaccutt

SEQ ID NO: 2087 - DNA, 21 bp, Artificial Sequence
  Synthetic
  misc_feature (1)..(1): 5'-3 attached terminal deoxyabasic moeity
  misc_feature (1)..(1): 2'-deoxy
  misc_feature (2)..(7): 2'-deoxy-2'-Fluoro
  misc_feature (8)..(15): 2'-deoxy
  misc_feature (16)..(16): 2'-deoxy-2'-Fluoro
  misc_feature (17)..(17): 2'-deoxy
  misc_feature (18)..(18): 2'-deoxy-2'-Fluoro
  misc_feature (19)..(19): 2'-deoxy
  misc_feature (21)..(21): 3'-3 attached terminal deoxyabasic moeity
gcucccuggaaagaauacatt

SEQ ID NO: 2088 - DNA, 21 bp, Artificial Sequence
  Synthetic
  misc_feature (1)..(1): 5'-3 attached terminal deoxyabasic moeity
  misc_feature (1)..(7): 2'-deoxy
  misc_feature (8)..(12): 2'-deoxy-2'-Fluoro
  misc_feature (13)..(14): 2'-deoxy
  misc_feature (15)..(15): 2'-deoxy-2'-Fluoro
  misc_feature (16)..(16): 2'-deoxy
  misc_feature (17)..(17): 2'-deoxy-2'-Fluoro
  misc_feature (18)..(19): 2'-deoxy
  misc_feature (21)..(21): 3'-3 attached terminal deoxyabasic moeity
ggaaaagucuucaaugugatt

SEQ ID NO: 2089 - DNA, 21 bp, Artificial Sequence
  Synthetic
  misc_feature (1)..(1): 5'-3 attached terminal deoxyabasic moeity
  misc_feature (1)..(3): 2'-deoxy-2'-Fluoro
  misc_feature (4)..(6): 2'-deoxy
  misc_feature (7)..(8): 2'-deoxy-2'-Fluoro
  misc_feature (9)..(10): 2'-deoxy
  misc_feature (11)..(12): 2'-deoxy-2'-Fluoro
  misc_feature (13)..(16): 2'-deoxy
  misc_feature (17)..(17): 2'-deoxy-2'-Fluoro
  misc_feature (18)..(19): 2'-deoxy
  misc_feature (21)..(21): 3'-3 attached terminal deoxyabasic moeity
uuuaaauugacuaaaguggtt

SEQ ID NO: 2090 - DNA, 21 bp, Artificial Sequence
  Synthetic
  misc_feature (1)..(1): 5'-3 attached terminal deoxyabasic moeity
  misc_feature (1)..(1): 2'-deoxy
  misc_feature (2)..(2): 2'-deoxy-2'-Fluoro
  misc_feature (3)..(4): 2'-deoxy
  misc_feature (5)..(6): 2'-deoxy-2'-Fluoro
  misc_feature (7)..(11): 2'-deoxy
  misc_feature (12)..(12): 2'-deoxy-2'-Fluoro
  misc_feature (13)..(14): 2'-deoxy
  misc_feature (15)..(15): 2'-deoxy-2'-Fluoro
  misc_feature (16)..(16): 2'-deoxy
  misc_feature (17)..(18): 2'-deoxy-2'-Fluoro
  misc_feature (19)..(19): 2'-deoxy
  misc_feature (21)..(21): 3'-3 attached terminal deoxyabasic moeity
auggucaaggauaaugcugtt

SEQ ID NO: 2091 - DNA, 21 bp, Artificial Sequence
  Synthetic
  misc_feature (1)..(1): 5'-3 attached terminal deoxyabasic moeity
  misc_feature (1)..(1): 2'-deoxy-2'-Fluoro
  misc_feature (2)..(3): 2'-deoxy
  misc_feature (4)..(5): 2'-deoxy-2'-Fluoro
  misc_feature (6)..(10): 2'-deoxy
  misc_feature (11)..(11): 2'-deoxy-2'-Fluoro
  misc_feature (12)..(13): 2'-deoxy
  misc_feature (14)..(14): 2'-deoxy-2'-Fluoro
  misc_feature (15)..(15): 2'-deoxy
  misc_feature (16)..(17): 2'-deoxy-2'-Fluoro
  misc_feature (18)..(19): 2'-deoxy
  misc_feature (21)..(21): 3'-3 attached terminal deoxyabasic moeity
uggucaaggauaaugcuggtt

SEQ ID NO: 2092 - DNA, 21 bp, Artificial Sequence
  Synthetic
  misc_feature (1)..(1): 5'-3 attached terminal deoxyabasic moeity
  misc_feature (1)..(2): 2'-deoxy
  misc_feature (3)..(4): 2'-deoxy-2'-Fluoro
  misc_feature (5)..(9): 2'-deoxy
  misc_feature (10)..(10): 2'-deoxy-2'-Fluoro
  misc_feature (11)..(12): 2'-deoxy
  misc_feature (13)..(13): 2'-deoxy-2'-Fluoro
  misc_feature (14)..(14): 2'-deoxy
  misc_feature (15)..(16): 2'-deoxy-2'-Fluoro
  misc_feature (17)..(19): 2'-deoxy
  misc_feature (21)..(21): 3'-3 attached terminal deoxyabasic moeity
ggucaaggauaaugcugggtt

SEQ ID NO: 2093 - DNA, 21 bp, Artificial Sequence
  Synthetic
  misc_feature (1)..(1): 5'-3 attached terminal deoxyabasic moeity
  misc_feature (1)..(2): 2'-deoxy-2'-Fluoro
  misc_feature (3)..(7): 2'-deoxy
  misc_feature (8)..(8): 2'-deoxy-2'-Fluoro
  misc_feature (9)..(10): 2'-deoxy
  misc_feature (11)..(11): 2'-deoxy-2'-Fluoro
  misc_feature (12)..(12): 2'-deoxy
  misc_feature (13)..(14): 2'-deoxy-2'-Fluoro
  misc_feature (15)..(19): 2'-deoxy
  misc_feature (21)..(21): 3'-3 attached terminal deoxyabasic moeity
ucaaggauaaugcugggaatt

SEQ ID NO: 2094 - DNA, 21 bp, Artificial Sequence
  Synthetic
  misc_feature (1)..(1): 5'-3 attached terminal deoxyabasic moeity
  misc_feature (1)..(1): 2'-deoxy
  misc_feature (2)..(2): 2'-deoxy-2'-Fluoro
  misc_feature (3)..(4): 2'-deoxy
  misc_feature (5)..(5): 2'-deoxy-2'-Fluoro
  misc_feature (6)..(6): 2'-deoxy
  misc_feature (7)..(8): 2'-deoxy-2'-Fluoro
  misc_feature (9)..(15): 2'-deoxy
  misc_feature (16)..(17): 2'-deoxy-2'-Fluoro
  misc_feature (18)..(19): 2'-deoxy
  misc_feature (21)..(21): 3'-3 attached terminal deoxyabasic moeity
auaaugcugggaaaauuagtt

SEQ ID NO: 2095 - DNA, 21 bp, Artificial Sequence
  Synthetic
  misc_feature (1)..(1): 5'-3 attached terminal deoxyabasic moeity
  misc_feature (1)..(1): 2'-deoxy
  misc_feature (2)..(2): 2'-deoxy-2'-Fluoro
  misc_feature (3)..(3): 2'-deoxy
  misc_feature (4)..(5): 2'-deoxy-2'-Fluoro
  misc_feature (6)..(12): 2'-deoxy
  misc_feature (13)..(14): 2'-deoxy-2'-Fluoro
  misc_feature (15)..(17): 2'-deoxy
  misc_feature (18)..(19): 2'-deoxy-2'-Fluoro
  misc_feature (21)..(21): 3'-3 attached terminal deoxyabasic moeity
augcugggaaaauuaggcctt

SEQ ID NO: 2096 - DNA, 21 bp, Artificial Sequence
  Synthetic
  misc_feature (1)..(1): 5'-3 attached terminal deoxyabasic moeity
  misc_feature (1)..(1): 2'-deoxy-2'-Fluoro
  misc_feature (2)..(2): 2'-deoxy
  misc_feature (3)..(4): 2'-deoxy-2'-Fluoro
  misc_feature (5)..(11): 2'-deoxy
  misc_feature (12)..(13): 2'-deoxy-2'-Fluoro
  misc_feature (14)..(16): 2'-deoxy
  misc_feature (17)..(18): 2'-deoxy-2'-Fluoro
  misc_feature (19)..(19): 2'-deoxy
  misc_feature (21)..(21): 3'-3 attached terminal deoxyabasic moeity
ugcugggaaaauuaggccatt

SEQ ID NO: 2097 - DNA, 21 bp, Artificial Sequence
  Synthetic
  misc_feature (1)..(1): 5'-3 attached terminal deoxyabasic moeity
  misc_feature (1)..(7): 2'-deoxy
  misc_feature (8)..(9): 2'-deoxy-2'-Fluoro
  misc_feature (10)..(12): 2'-deoxy
  misc_feature (13)..(14): 2'-deoxy-2'-Fluoro
  misc_feature (15)..(15): 2'-deoxy
  misc_feature (16)..(19): 2'-deoxy-2'-Fluoro
  misc_feature (21)..(21): 3'-3 attached terminal deoxyabasic moeity
gggaaaauuaggccauccutt

SEQ ID NO: 2098 - DNA, 21 bp, Artificial Sequence
  Synthetic
  misc_feature (1)..(1): 5'-3 attached terminal deoxyabasic moeity
  misc_feature (1)..(5): 2'-deoxy-2'-Fluoro
  misc_feature (6)..(10): 2'-deoxy
  misc_feature (11)..(11): 2'-deoxy-2'-Fluoro
  misc_feature (12)..(13): 2'-deoxy
  misc_feature (14)..(14): 2'-deoxy-2'-Fluoro
  misc_feature (15)..(15): 2'-deoxy
  misc_feature (16)..(19): 2'-deoxy-2'-Fluoro
  misc_feature (21)..(21): 3'-3 attached terminal deoxyabasic moeity
uccucaaaaauggugccuutt

SEQ ID NO: 2099 - DNA, 21 bp, Artificial Sequence
  Synthetic
  misc_feature (1)..(1): 5'-3 attached terminal deoxyabasic moeity
  misc_feature (1)..(4): 2'-deoxy-2'-Fluoro
  misc_feature (5)..(9): 2'-deoxy
  misc_feature (10)..(10): 2'-deoxy-2'-Fluoro
  misc_feature (11)..(12): 2'-deoxy
  misc_feature (13)..(13): 2'-deoxy-2'-Fluoro
  misc_feature (14)..(14): 2'-deoxy
  misc_feature (15)..(18): 2'-deoxy-2'-Fluoro
  misc_feature (19)..(19): 2'-deoxy
  misc_feature (21)..(21): 3'-3 attached terminal deoxyabasic moeity
ccucaaaaauggugccuuatt

SEQ ID NO: 2100 - DNA, 21 bp, Artificial Sequence
  Synthetic
  misc_feature (1)..(1): 5'-3 attached terminal deoxyabasic moeity
  misc_feature (1)..(3): 2'-deoxy
  misc_feature (4)..(5): 2'-deoxy-2'-Fluoro
  misc_feature (6)..(13): 2'-deoxy
  misc_feature (14)..(14): 2'-deoxy-2'-Fluoro
  misc_feature (15)..(17): 2'-deoxy
  misc_feature (18)..(18): 2'-deoxy-2'-Fluoro
  misc_feature (19)..(19): 2'-deoxy
  misc_feature (21)..(21): 3'-3 attached terminal deoxyabasic moeity
agguugaagaggacaaaugtt

SEQ ID NO: 2101 - DNA, 21 bp, Artificial Sequence
  Synthetic
  misc_feature (1)..(1): 5'-3 attached terminal deoxyabasic moeity
  misc_feature (1)..(6): 2'-deoxy
  misc_feature (7)..(7): 2'-deoxy-2'-Fluoro
  misc_feature (8)..(10): 2'-deoxy
  misc_feature (11)..(11): 2'-deoxy-2'-Fluoro
  misc_feature (12)..(12): 2'-deoxy
  misc_feature (13)..(14): 2'-deoxy-2'-Fluoro
  misc_feature (15)..(18): 2'-deoxy
  misc_feature (19)..(19): 2'-deoxy-2'-Fluoro
  misc_feature (21)..(21): 3'-3 attached terminal deoxyabasic moeity
agaggacaaaugccagaautt

SEQ ID NO: 2102 - DNA, 21 bp, Artificial Sequence
  Synthetic
  misc_feature (1)..(1): 5'-3 attached terminal deoxyabasic moeity
  misc_feature (1)..(1): 2'-deoxy-2'-Fluoro
  misc_feature (2)..(5): 2'-deoxy
  misc_feature (6)..(9): 2'-deoxy-2'-Fluoro
  misc_feature (10)..(12): 2'-deoxy
  misc_feature (13)..(15): 2'-deoxy-2'-Fluoro
  misc_feature (16)..(17): 2'-deoxy
  misc_feature (18)..(18): 2'-deoxy-2'-Fluoro
  misc_feature (19)..(19): 2'-deoxy
  misc_feature (21)..(21): 3'-3 attached terminal deoxyabasic moeity
cagaauucugaauuugauatt

SEQ ID NO: 2103 - DNA, 21 bp, Artificial Sequence
  Synthetic
  misc_feature (1)..(1): 5'-3 attached terminal deoxyabasic moeity
  misc_feature (1)..(4): 2'-deoxy
  misc_feature (5)..(8): 2'-deoxy-2'-Fluoro
  misc_feature (9)..(11): 2'-deoxy
  misc_feature (12)..(14): 2'-deoxy-2'-Fluoro
  misc_feature (15)..(16): 2'-deoxy
  misc_feature (17)..(17): 2'-deoxy-2'-Fluoro
  misc_feature (18)..(19): 2'-deoxy
  misc_feature (21)..(21): 3'-3 attached terminal deoxyabasic moeity
agaauucugaauuugauagtt

SEQ ID NO: 2104 - DNA, 21 bp, Artificial Sequence
  Synthetic
  misc_feature (1)..(1): 5'-3 attached terminal deoxyabasic moeity
  misc_feature (1)..(1): 2'-deoxy-2'-Fluoro
  misc_feature (2)..(3): 2'-deoxy
  misc_feature (4)..(4): 2'-deoxy-2'-Fluoro
  misc_feature (5)..(9): 2'-deoxy
  misc_feature (10)..(10): 2'-deoxy-2'-Fluoro
  misc_feature (11)..(11): 2'-deoxy
  misc_feature (12)..(12): 2'-deoxy-2'-Fluoro
  misc_feature (13)..(18): 2'-deoxy
  misc_feature (19)..(19): 2'-deoxy-2'-Fluoro
  misc_feature (21)..(21): 3'-3 attached terminal deoxyabasic moeity
ugauagaaacauggagggutt

SEQ ID NO: 2105 - DNA, 21 bp, Artificial Sequence
  Synthetic
  misc_feature (1)..(1): 5'-3 attached terminal deoxyabasic moeity
  misc_feature (1)..(1): 2'-deoxy-2'-Fluoro
  misc_feature (2)..(5): 2'-deoxy
  misc_feature (6)..(6): 2'-deoxy-2'-Fluoro
  misc_feature (7)..(8): 2'-deoxy
  misc_feature (9)..(10): 2'-deoxy-2'-Fluoro
  misc_feature (11)..(14): 2'-deoxy
  misc_feature (15)..(15): 2'-deoxy-2'-Fluoro
  misc_feature (16)..(19): 2'-deoxy
  misc_feature (21)..(21): 3'-3 attached terminal deoxyabasic moeity
uggaguaauuggagcgaagtt

SEQ ID NO: 2106 - DNA, 21 bp, Artificial Sequence
  Synthetic
  misc_feature (1)..(1): 5'-3 attached terminal deoxyabasic moeity
  misc_feature (1)..(4): 2'-deoxy
  misc_feature (5)..(5): 2'-deoxy-2'-Fluoro
  misc_feature (6)..(7): 2'-deoxy
  misc_feature (8)..(9): 2'-deoxy-2'-Fluoro
  misc_feature (10)..(13): 2'-deoxy
  misc_feature (14)..(14): 2'-deoxy-2'-Fluoro
  misc_feature (15)..(18): 2'-deoxy
  misc_feature (19)..(19): 2'-deoxy-2'-Fluoro
  misc_feature (21)..(21): 3'-3 attached terminal deoxyabasic moeity
ggaguaauuggagcgaagctt

SEQ ID NO: 2107 - DNA, 21 bp, Artificial Sequence
  Synthetic
  misc_feature (1)..(1): 5'-3 attached terminal deoxyabasic moeity
  misc_feature (1)..(3): 2'-deoxy
  misc_feature (4)..(4): 2'-deoxy-2'-Fluoro
  misc_feature (5)..(6): 2'-deoxy
  misc_feature (7)..(8): 2'-deoxy-2'-Fluoro
  misc_feature (9)..(12): 2'-deoxy
  misc_feature (13)..(13): 2'-deoxy-2'-Fluoro
  misc_feature (14)..(17): 2'-deoxy
  misc_feature (18)..(18): 2'-deoxy-2'-Fluoro
  misc_feature (19)..(19): 2'-deoxy
  misc_feature (21)..(21): 3'-3 attached terminal deoxyabasic moeity
gaguaauuggagcgaagcgtt

SEQ ID NO: 2108 - DNA, 21 bp, Artificial Sequence
  Synthetic
  misc_feature (1)..(1): 5'-3 attached terminal deoxyabasic moeity
  misc_feature (1)..(3): 2'-deoxy-2'-Fluoro
  misc_feature (4)..(7): 2'-deoxy
  misc_feature (8)..(9): 2'-deoxy-2'-Fluoro
  misc_feature (10)..(10): 2'-deoxy
  misc_feature (11)..(12): 2'-deoxy-2'-Fluoro
  misc_feature (13)..(13): 2'-deoxy
  misc_feature (14)..(14): 2'-deoxy-2'-Fluoro
  misc_feature (15)..(15): 2'-deoxy
  misc_feature (16)..(19): 2'-deoxy-2'-Fluoro
  misc_feature (21)..(21): 3'-3 attached terminal deoxyabasic moeity
cuuaagaucauuauauuuctt

SEQ ID NO: 2109 - DNA, 21 bp, Artificial Sequence
  Synthetic
  misc_feature (1)..(1): 5'-3 attached terminal deoxyabasic moeity
  misc_feature (1)..(7): 2'-deoxy-2'-Fluoro
  misc_feature (8)..(9): 2'-deoxy
  misc_feature (10)..(14): 2'-deoxy-2'-Fluoro
  misc_feature (15)..(16): 2'-deoxy
  misc_feature (17)..(19): 2'-deoxy-2'-Fluoro
  misc_feature (21)..(21): 3'-3 attached terminal deoxyabasic moeity
uuccuccaauuccugaucctt

SEQ ID NO: 2110 - DNA, 21 bp, Artificial Sequence
  Synthetic
  misc_feature (1)..(1): 5'-3 attached terminal deoxyabasic moeity
  misc_feature (1)..(1): 2'-deoxy
  misc_feature (2)..(6): 2'-deoxy-2'-Fluoro
  misc_feature (7)..(8): 2'-deoxy
  misc_feature (9)..(12): 2'-deoxy-2'-Fluoro
  misc_feature (13)..(14): 2'-deoxy
  misc_feature (15)..(15): 2'-deoxy-2'-Fluoro
  misc_feature (16)..(19): 2'-deoxy
  misc_feature (21)..(21): 3'-3 attached terminal deoxyabasic moeity
auuccugauccuggcaagatt

SEQ ID NO: 2111 - DNA, 21 bp, Artificial Sequence
  Synthetic
  misc_feature (1)..(1): 5'-3 attached terminal deoxyabasic moeity
  misc_feature (1)..(4): 2'-deoxy-2'-Fluoro
  misc_feature (5)..(6): 2'-deoxy
  misc_feature (7)..(10): 2'-deoxy-2'-Fluoro
  misc_feature (11)..(12): 2'-deoxy
  misc_feature (13)..(13): 2'-deoxy-2'-Fluoro
  misc_feature (14)..(17): 2'-deoxy
  misc_feature (18)..(19): 2'-deoxy-2'-Fluoro
  misc_feature (21)..(21): 3'-3 attached terminal deoxyabasic moeity
uccugauccuggcaagauutt

SEQ ID NO: 2112 - DNA, 21 bp, Artificial Sequence
  Synthetic
  misc_feature (1)..(1): 5'-3 attached terminal deoxyabasic moeity
  misc_feature (1)..(3): 2'-deoxy-2'-Fluoro
  misc_feature (4)..(5): 2'-deoxy
  misc_feature (6)..(9): 2'-deoxy-2'-Fluoro
  misc_feature (10)..(11): 2'-deoxy
  misc_feature (12)..(12): 2'-deoxy-2'-Fluoro
  misc_feature (13)..(16): 2'-deoxy
  misc_feature (17)..(19): 2'-deoxy-2'-Fluoro
  misc_feature (21)..(21): 3'-3 attached terminal deoxyabasic moeity
ccugauccuggcaagauuutt

SEQ ID NO: 2113 - DNA, 21 bp, Artificial Sequence
  Synthetic
  misc_feature (1)..(1): 5'-3 attached terminal deoxyabasic moeity
  misc_feature (1)..(1): 2'-deoxy-2'-Fluoro
  misc_feature (2)..(3): 2'-deoxy
  misc_feature (4)..(4): 2'-deoxy-2'-Fluoro
  misc_feature (5)..(8): 2'-deoxy
  misc_feature (9)..(13): 2'-deoxy-2'-Fluoro
  misc_feature (14)..(19): 2'-deoxy
  misc_feature (21)..(21): 3'-3 attached terminal deoxyabasic moeity
uggcaagauuuuuaaagaatt

SEQ ID NO: 2114 - DNA, 21 bp, Artificial Sequence
  Synthetic
  misc_feature (1)..(1): 5'-3 attached terminal deoxyabasic moeity
  misc_feature (1)..(3): 2'-deoxy-2'-Fluoro
  misc_feature (4)..(10): 2'-deoxy
  misc_feature (11)..(11): 2'-deoxy-2'-Fluoro
  misc_feature (12)..(12): 2'-deoxy
  misc_feature (13)..(15): 2'-deoxy-2'-Fluoro
  misc_feature (16)..(19): 2'-deoxy
  misc_feature (21)..(21): 3'-3 attached terminal deoxyabasic moeity
uuuaaagaaauguuuggagtt

SEQ ID NO: 2115 - DNA, 21 bp, Artificial Sequence
  Synthetic
  misc_feature (1)..(1): 5'-3 attached terminal deoxyabasic moeity
  misc_feature (1)..(4): 2'-deoxy
  misc_feature (5)..(6): 2'-deoxy-2'-Fluoro
  misc_feature (7)..(10): 2'-deoxy
  misc_feature (11)..(11): 2'-deoxy-2'-Fluoro
  misc_feature (12)..(13): 2'-deoxy
  misc_feature (14)..(14): 2'-deoxy-2'-Fluoro
  misc_feature (15)..(16): 2'-deoxy
  misc_feature (17)..(17): 2'-deoxy-2'-Fluoro
  misc_feature (18)..(18): 2'-deoxy
  misc_feature (19)..(19): 2'-deoxy-2'-Fluoro
  misc_feature (21)..(21): 3'-3 attached terminal deoxyabasic moeity
gagaccagaaugaugauactt

SEQ ID NO: 2116 - DNA, 21 bp, Artificial Sequence
  Synthetic
  misc_feature (1)..(1): 5'-3 attached terminal deoxyabasic moeity
  misc_feature (1)..(3): 2'-deoxy
  misc_feature (4)..(5): 2'-deoxy-2'-Fluoro
  misc_feature (6)..(9): 2'-deoxy
  misc_feature (10)..(10): 2'-deoxy-2'-Fluoro
  misc_feature (11)..(12): 2'-deoxy
  misc_feature (13)..(13): 2'-deoxy-2'-Fluoro
  misc_feature (14)..(15): 2'-deoxy
  misc_feature (16)..(16): 2'-deoxy-2'-Fluoro
  misc_feature (17)..(17): 2'-deoxy
  misc_feature (18)..(19): 2'-deoxy-2'-Fluoro
  misc_feature (21)..(21): 3'-3 attached terminal deoxyabasic moeity
agaccagaaugaugauacctt

SEQ ID NO: 2117 - DNA, 21 bp, Artificial Sequence
  Synthetic
  misc_feature (1)..(1): 5'-3 attached terminal deoxyabasic moeity
  misc_feature (1)..(2): 2'-deoxy-2'-Fluoro
  misc_feature (3)..(6): 2'-deoxy
  misc_feature (7)..(7): 2'-deoxy-2'-Fluoro
  misc_feature (8)..(9): 2'-deoxy
  misc_feature (10)..(10): 2'-deoxy-2'-Fluoro
  misc_feature (11)..(12): 2'-deoxy
  misc_feature (13)..(13): 2'-deoxy-2'-Fluoro
  misc_feature (14)..(14): 2'-deoxy
  misc_feature (15)..(18): 2'-deoxy-2'-Fluoro
  misc_feature (19)..(19): 2'-deoxy
  misc_feature (21)..(21): 3'-3 attached terminal deoxyabasic moeity
ccagaaugaugauacccugtt

SEQ ID NO: 2118 - DNA, 21 bp, Artificial Sequence
  Synthetic
  misc_feature (1)..(1): 5'-3 attached terminal deoxyabasic moeity
  misc_feature (1)..(1): 2'-deoxy-2'-Fluoro
  misc_feature (2)..(5): 2'-deoxy
  misc_feature (6)..(6): 2'-deoxy-2'-Fluoro
  misc_feature (7)..(8): 2'-deoxy
  misc_feature (9)..(9): 2'-deoxy-2'-Fluoro
  misc_feature (10)..(11): 2'-deoxy
  misc_feature (12)..(12): 2'-deoxy-2'-Fluoro
  misc_feature (13)..(13): 2'-deoxy
  misc_feature (14)..(17): 2'-deoxy-2'-Fluoro
  misc_feature (18)..(18): 2'-deoxy
  misc_feature (19)..(19): 2'-deoxy-2'-Fluoro
  misc_feature (21)..(21): 3'-3 attached terminal deoxyabasic moeity
cagaaugaugauacccugctt

SEQ ID NO: 2119 - DNA, 21 bp, Artificial Sequence
  Synthetic
  misc_feature (1)..(1): 5'-3 attached terminal deoxyabasic moeity
  misc_feature (1)..(4): 2'-deoxy
  misc_feature (5)..(5): 2'-deoxy-2'-Fluoro
  misc_feature (6)..(7): 2'-deoxy
  misc_feature (8)..(8): 2'-deoxy-2'-Fluoro
  misc_feature (9)..(10): 2'-deoxy
  misc_feature (11)..(11): 2'-deoxy-2'-Fluoro
  misc_feature (12)..(12): 2'-deoxy
  misc_feature (13)..(16): 2'-deoxy-2'-Fluoro
  misc_feature (17)..(17): 2'-deoxy
  misc_feature (18)..(18): 2'-deoxy-2'-Fluoro
  misc_feature (19)..(19): 2'-deoxy
  misc_feature (21)..(21): 3'-3 attached terminal deoxyabasic moeity
agaaugaugauacccugcatt

SEQ ID NO: 2120 - DNA, 21 bp, Artificial Sequence
  Synthetic
  misc_feature (1)..(1): 5'-3 attached terminal deoxyabasic moeity
  misc_feature (1)..(1): 2'-deoxy-2'-Fluoro
  misc_feature (2)..(3): 2'-deoxy
  misc_feature (4)..(4): 2'-deoxy-2'-Fluoro
  misc_feature (5)..(6): 2'-deoxy
  misc_feature (7)..(7): 2'-deoxy-2'-Fluoro
  misc_feature (8)..(8): 2'-deoxy
  misc_feature (9)..(12): 2'-deoxy-2'-Fluoro
  misc_feature (13)..(13): 2'-deoxy
  misc_feature (14)..(14): 2'-deoxy-2'-Fluoro
  misc_feature (15)..(15): 2'-deoxy
  misc_feature (16)..(17): 2'-deoxy-2'-Fluoro
  misc_feature (18)..(19): 2'-deoxy
  misc_feature (21)..(21): 3'-3 attached terminal deoxyabasic moeity
ugaugauacccugcacuggtt

SEQ ID NO: 2121 - DNA, 21 bp, Artificial Sequence
  Synthetic
  misc_feature (1)..(3): 2'-O-methyl
  misc_feature (4)..(4): 2'-deoxy-2'-Fluoro
  misc_feature (5)..(6): 2'-O-methyl
  misc_feature (7)..(8): 2'-deoxy-2'-Fluoro
  misc_feature (9)..(11): 2'-O-methyl
  misc_feature (12)..(16): 2'-deoxy-2'-Fluoro
  misc_feature (17)..(17): 2'-O-methyl
  misc_feature (18)..(18): 2'-deoxy-2'-Fluoro
  misc_feature (19)..(19): 2'-O-methyl
agguggcugaacuucugugtt

SEQ ID NO: 2122 - DNA, 21 bp, Artificial Sequence
  Synthetic
  misc_feature (1)..(1): 2'-O-methyl
  misc_feature (3)..(5): 2'-O-methyl
  misc_feature (6)..(6): 2'-deoxy-2'-Fluoro
  misc_feature (7)..(8): 2'-O-methyl
  misc_feature (9)..(10): 2'-deoxy-2'-Fluoro
  misc_feature (11)..(13): 2'-O-methyl
  misc_feature (14)..(18): 2'-deoxy-2'-Fluoro
  misc_feature (19)..(19): 2'-O-methyl
acagguggcugaacuucugtt

SEQ ID NO: 2123 - DNA, 21 bp, Artificial Sequence
  Synthetic
  misc_feature (2)..(2): 2'-O-methyl
  misc_feature (4)..(6): 2'-O-methyl
  misc_feature (7)..(7): 2'-deoxy-2'-Fluoro
  misc_feature (8)..(9): 2'-O-methyl
  misc_feature (10)..(11): 2'-deoxy-2'-Fluoro
  misc_feature (12)..(14): 2'-O-methyl
  misc_feature (15)..(19): 2'-deoxy-2'-Fluoro
cacagguggcugaacuucutt

SEQ ID NO: 2124 - DNA, 21 bp, Artificial Sequence
  Synthetic
  misc_feature (3)..(5): 2'-O-methyl
  misc_feature (6)..(8): 2'-deoxy-2'-Fluoro
  misc_feature (9)..(9): 2'-O-methyl
  misc_feature (10)..(11): 2'-deoxy-2'-Fluoro
  misc_feature (12)..(12): 2'-O-methyl
  misc_feature (13)..(13): 2'-deoxy-2'-Fluoro
  misc_feature (14)..(16): 2'-O-methyl
  misc_feature (17)..(17): 2'-deoxy-2'-Fluoro
  misc_feature (18)..(19): 2'-O-methyl
ucaaauucgucacagguggtt

SEQ ID NO: 2125 - DNA, 21 bp, Artificial Sequence
  Synthetic
  misc_feature (1)..(1): 2'-O-methyl
  misc_feature (3)..(3): 2'-O-methyl
  misc_feature (4)..(4): 2'-deoxy-2'-Fluoro
  misc_feature (5)..(9): 2'-O-methyl
  misc_feature (10)..(14): 2'-deoxy-2'-Fluoro
  misc_feature (15)..(16): 2'-O-methyl
  misc_feature (17)..(17): 2'-deoxy-2'-Fluoro
  misc_feature (18)..(19): 2'-O-methyl
gugcagagauuuucgacagtt

SEQ ID NO: 2126 - DNA, 21 bp, Artificial Sequence
  Synthetic
  misc_feature (1)..(3): 2'-O-methyl
  misc_feature (4)..(5): 2'-deoxy-2'-Fluoro
  misc_feature (6)..(8): 2'-O-methyl
  misc_feature (9)..(14): 2'-deoxy-2'-Fluoro
  misc_feature (15)..(15): 2'-O-methyl
  misc_feature (16)..(19): 2'-deoxy-2'-Fluoro
gggcuaggcuucucacuuutt

SEQ ID NO: 2127 - DNA, 21 bp, Artificial Sequence
  Synthetic
  misc_feature (2)..(7): 2'-O-methyl
  misc_feature (8)..(9): 2'-deoxy-2'-Fluoro
  misc_feature (10)..(12): 2'-O-methyl
  misc_feature (13)..(18): 2'-deoxy-2'-Fluoro
  misc_feature (19)..(19): 2'-O-methyl
caaagggcuaggcuucucatt

SEQ ID NO: 2128 - DNA, 21 bp, Artificial Sequence
  Synthetic
  misc_feature (2)..(2): 2'-O-methyl
  misc_feature (4)..(4): 2'-deoxy-2'-Fluoro
  misc_feature (5)..(10): 2'-O-methyl
  misc_feature (11)..(12): 2'-deoxy-2'-Fluoro
  misc_feature (13)..(15): 2'-O-methyl
  misc_feature (16)..(19): 2'-deoxy-2'-Fluoro
caccaaagggcuaggcuuctt

SEQ ID NO: 2129 - DNA, 21 bp, Artificial Sequence
  Synthetic
  misc_feature (4)..(7): 2'-deoxy-2'-Fluoro
  misc_feature (8)..(8): 2'-O-methyl
  misc_feature (9)..(10): 2'-deoxy-2'-Fluoro
  misc_feature (11)..(16): 2'-O-methyl
  misc_feature (17)..(18): 2'-deoxy-2'-Fluoro
  misc_feature (19)..(19): 2'-O-methyl
cuuuuucaccaaagggcuatt

SEQ ID NO: 2130 - DNA, 21 bp, Artificial Sequence
  Synthetic
  misc_feature (1)..(2): 2'-O-methyl
  misc_feature (4)..(4): 2'-O-methyl
  misc_feature (5)..(5): 2'-deoxy-2'-Fluoro
  misc_feature (6)..(6): 2'-O-methyl
  misc_feature (7)..(13): 2'-deoxy-2'-Fluoro
  misc_feature (14)..(14): 2'-O-methyl
  misc_feature (15)..(16): 2'-deoxy-2'-Fluoro
  misc_feature (17)..(19): 2'-O-methyl
gaugcacuuuuucaccaaatt

SEQ ID NO: 2131 - DNA, 21 bp, Artificial Sequence
  Synthetic
  misc_feature (1)..(3): 2'-O-methyl
  misc_feature (4)..(4): 2'-deoxy-2'-Fluoro
  misc_feature (5)..(5): 2'-O-methyl
  misc_feature (6)..(6): 2'-deoxy-2'-Fluoro
  misc_feature (7)..(7): 2'-O-methyl
  misc_feature (8)..(14): 2'-deoxy-2'-Fluoro
  misc_feature (15)..(15): 2'-O-methyl
  misc_feature (16)..(17): 2'-deoxy-2'-Fluoro
  misc_feature (18)..(19): 2'-O-methyl
agaugcacuuuuucaccaatt

SEQ ID NO: 2132 - DNA, 21 bp, Artificial Sequence
  Synthetic
  misc_feature (2)..(5): 2'-O-methyl
  misc_feature (6)..(6): 2'-deoxy-2'-Fluoro
  misc_feature (7)..(7): 2'-O-methyl
  misc_feature (8)..(8): 2'-deoxy-2'-Fluoro
  misc_feature (9)..(9): 2'-O-methyl
  misc_feature (10)..(16): 2'-deoxy-2'-Fluoro
  misc_feature (17)..(17): 2'-O-methyl
  misc_feature (18)..(19): 2'-deoxy-2'-Fluoro
ugagaugcacuuuuucacctt

SEQ ID NO: 2133 - DNA, 21 bp, Artificial Sequence
  Synthetic
  misc_feature (1)..(1): 2'-O-methyl
  misc_feature (3)..(3): 2'-O-methyl
  misc_feature (4)..(5): 2'-deoxy-2'-Fluoro
  misc_feature (6)..(8): 2'-O-methyl
  misc_feature (9)..(9): 2'-deoxy-2'-Fluoro
  misc_feature (10)..(10): 2'-O-methyl
  misc_feature (11)..(11): 2'-deoxy-2'-Fluoro
  misc_feature (12)..(12): 2'-O-methyl
  misc_feature (13)..(14): 2'-deoxy-2'-Fluoro
  misc_feature (15)..(15): 2'-O-methyl
  misc_feature (16)..(16): 2'-deoxy-2'-Fluoro
  misc_feature (17)..(18): 2'-O-methyl
  misc_feature (19)..(19): 2'-deoxy-2'-Fluoro
gugccaagugcacugcagutt

SEQ ID NO: 2134 - DNA, 21 bp, Artificial Sequence
  Synthetic
  misc_feature (1)..(3): 2'-O-methyl
  misc_feature (4)..(5): 2'-deoxy-2'-Fluoro
  misc_feature (6)..(6): 2'-O-methyl
  misc_feature (7)..(7): 2'-deoxy-2'-Fluoro
  misc_feature (8)..(8): 2'-O-methyl
  misc_feature (9)..(10): 2'-deoxy-2'-Fluoro
  misc_feature (11)..(13): 2'-O-methyl
  misc_feature (14)..(14): 2'-deoxy-2'-Fluoro
  misc_feature (15)..(15): 2'-O-methyl
  misc_feature (16)..(16): 2'-deoxy-2'-Fluoro
  misc_feature (17)..(17): 2'-O-methyl
  misc_feature (18)..(19): 2'-deoxy-2'-Fluoro
agguugugccaagugcacutt

SEQ ID NO: 2135 - DNA, 21 bp, Artificial Sequence
  Synthetic
  misc_feature (2)..(2): 2'-O-methyl
  misc_feature (4)..(4): 2'-O-methyl
  misc_feature (5)..(12): 2'-deoxy-2'-Fluoro
  misc_feature (13)..(18): 2'-O-methyl
  misc_feature (19)..(19): 2'-deoxy-2'-Fluoro
uguauucuuuccagggagctt

SEQ ID NO: 2136 - DNA, 21 bp, Artificial Sequence
  Synthetic
  misc_feature (3)..(3): 2'-O-methyl
  misc_feature (4)..(4): 2'-deoxy-2'-Fluoro
  misc_feature (5)..(5): 2'-O-methyl
  misc_feature (6)..(7): 2'-deoxy-2'-Fluoro
  misc_feature (8)..(12): 2'-O-methyl
  misc_feature (13)..(19): 2'-deoxy-2'-Fluoro
ucacauugaagacuuuucctt

SEQ ID NO: 2137 - DNA, 21 bp, Artificial Sequence
  Synthetic
  misc_feature (3)..(3): 2'-O-methyl
  misc_feature (4)..(7): 2'-deoxy-2'-Fluoro
  misc_feature (8)..(9): 2'-O-methyl
  misc_feature (10)..(11): 2'-deoxy-2'-Fluoro
  misc_feature (12)..(13): 2'-O-methyl
  misc_feature (14)..(16): 2'-deoxy-2'-Fluoro
  misc_feature (17)..(19): 2'-O-methyl
ccacuuuagucaauuuaaatt

SEQ ID NO: 2138 - DNA, 21 bp, Artificial Sequence
  Synthetic
  misc_feature (2)..(3): 2'-O-methyl
  misc_feature (4)..(4): 2'-deoxy-2'-Fluoro
  misc_feature (5)..(5): 2'-O-methyl
  misc_feature (6)..(7): 2'-deoxy-2'-Fluoro
  misc_feature (8)..(8): 2'-O-methyl
  misc_feature (9)..(13): 2'-deoxy-2'-Fluoro
  misc_feature (14)..(15): 2'-O-methyl
  misc_feature (16)..(17): 2'-deoxy-2'-Fluoro
  misc_feature (18)..(18): 2'-O-methyl
  misc_feature (19)..(19): 2'-deoxy-2'-Fluoro
cagcauuauccuugaccautt

SEQ ID NO: 2139 - DNA, 21 bp, Artificial Sequence
  Synthetic
  misc_feature (3)..(4): 2'-O-methyl
  misc_feature (5)..(5): 2'-deoxy-2'-Fluoro
  misc_feature (6)..(6): 2'-O-methyl
  misc_feature (7)..(8): 2'-deoxy-2'-Fluoro
  misc_feature (9)..(9): 2'-O-methyl
  misc_feature (10)..(14): 2'-deoxy-2'-Fluoro
  misc_feature (15)..(16): 2'-O-methyl
  misc_feature (17)..(18): 2'-deoxy-2'-Fluoro
  misc_feature (19)..(19): 2'-O-methyl
ccagcauuauccuugaccatt

SEQ ID NO: 2140 - DNA, 21 bp, Artificial Sequence
  Synthetic
  misc_feature (4)..(5): 2'-O-methyl
  misc_feature (6)..(6): 2'-deoxy-2'-Fluoro
  misc_feature (7)..(7): 2'-O-methyl
  misc_feature (8)..(9): 2'-deoxy-2'-Fluoro
  misc_feature (10)..(10): 2'-O-methyl
  misc_feature (11)..(15): 2'-deoxy-2'-Fluoro
  misc_feature (16)..(17): 2'-O-methyl
  misc_feature (18)..(19): 2'-deoxy-2'-Fluoro
cccagcauuauccuugacctt

SEQ ID NO: 2141 - DNA, 21 bp, Artificial Sequence
  Synthetic
  misc_feature (4)..(5): 2'-deoxy-2'-Fluoro
  misc_feature (6)..(7): 2'-O-methyl
  misc_feature (8)..(8): 2'-deoxy-2'-Fluoro
  misc_feature (9)..(9): 2'-O-methyl
  misc_feature (10)..(11): 2'-deoxy-2'-Fluoro
  misc_feature (12)..(12): 2'-O-methyl
  misc_feature (13)..(17): 2'-deoxy-2'-Fluoro
  misc_feature (18)..(19): 2'-O-methyl
uucccagcauuauccuugatt

SEQ ID NO: 2142 - DNA, 21 bp, Artificial Sequence
  Synthetic
  misc_feature (3)..(4): 2'-O-methyl
  misc_feature (5)..(11): 2'-deoxy-2'-Fluoro
  misc_feature (12)..(13): 2'-O-methyl
  misc_feature (14)..(14): 2'-deoxy-2'-Fluoro
  misc_feature (15)..(15): 2'-O-methyl
  misc_feature (16)..(17): 2'-deoxy-2'-Fluoro
  misc_feature (18)..(18): 2'-O-methyl
  misc_feature (19)..(19): 2'-deoxy-2'-Fluoro
cuaauuuucccagcauuautt

SEQ ID NO: 2143 - DNA, 21 bp, Artificial Sequence
  Synthetic
  misc_feature (1)..(2): 2'-O-methyl
  misc_feature (4)..(5): 2'-deoxy-2'-Fluoro
  misc_feature (6)..(7): 2'-O-methyl
  misc_feature (8)..(14): 2'-deoxy-2'-Fluoro
  misc_feature (15)..(16): 2'-O-methyl
  misc_feature (17)..(17): 2'-deoxy-2'-Fluoro
  misc_feature (18)..(18): 2'-O-methyl
  misc_feature (19)..(19): 2'-deoxy-2'-Fluoro
ggccuaauuuucccagcautt

SEQ ID NO: 2144 - DNA, 21 bp, Artificial Sequence
  Synthetic
  misc_feature (2)..(3): 2'-O-methyl
  misc_feature (4)..(6): 2'-deoxy-2'-Fluoro
  misc_feature (7)..(8): 2'-O-methyl
  misc_feature (9)..(15): 2'-deoxy-2'-Fluoro
  misc_feature (16)..(17): 2'-O-methyl
  misc_feature (18)..(18): 2'-deoxy-2'-Fluoro
  misc_feature (19)..(19): 2'-O-methyl
uggccuaauuuucccagcatt

SEQ ID NO: 2145 - DNA, 21 bp, Artificial Sequence
  Synthetic
  misc_feature (1)..(4): 2'-O-methyl
  misc_feature (5)..(5): 2'-deoxy-2'-Fluoro
  misc_feature (6)..(7): 2'-O-methyl
  misc_feature (8)..(10): 2'-deoxy-2'-Fluoro
  misc_feature (11)..(12): 2'-O-methyl
  misc_feature (13)..(19): 2'-deoxy-2'-Fluoro
aggauggccuaauuuuccctt

SEQ ID NO: 2146 - DNA, 21 bp, Artificial Sequence
  Synthetic
  misc_feature (1)..(4): 2'-O-methyl
  misc_feature (5)..(5): 2'-deoxy-2'-Fluoro
  misc_feature (6)..(6): 2'-O-methyl
  misc_feature (7)..(8): 2'-deoxy-2'-Fluoro
  misc_feature (9)..(9): 2'-O-methyl
  misc_feature (10)..(14): 2'-deoxy-2'-Fluoro
  misc_feature (15)..(19): 2'-O-methyl
aaggcaccauuuuugaggatt

SEQ ID NO: 2147 - DNA, 21 bp, Artificial Sequence
  Synthetic
  misc_feature (2)..(5): 2'-O-methyl
  misc_feature (6)..(6): 2'-deoxy-2'-Fluoro
  misc_feature (7)..(7): 2'-O-methyl
  misc_feature (8)..(9): 2'-deoxy-2'-Fluoro
  misc_feature (10)..(10): 2'-O-methyl
  misc_feature (11)..(15): 2'-deoxy-2'-Fluoro
  misc_feature (16)..(19): 2'-O-methyl
uaaggcaccauuuuugaggtt

SEQ ID NO: 2148 - DNA, 21 bp, Artificial Sequence
  Synthetic
  misc_feature (2)..(2): 2'-O-methyl
  misc_feature (4)..(5): 2'-deoxy-2'-Fluoro
  misc_feature (6)..(6): 2'-O-methyl
  misc_feature (7)..(14): 2'-deoxy-2'-Fluoro
  misc_feature (15)..(16): 2'-O-methyl
  misc_feature (17)..(19): 2'-deoxy-2'-Fluoro
cauuuguccucuucaaccutt

SEQ ID NO: 2149 - DNA, 21 bp, Artificial Sequence
  Synthetic
  misc_feature (1)..(1): 2'-O-methyl
  misc_feature (4)..(5): 2'-deoxy-2'-Fluoro
  misc_feature (6)..(7): 2'-O-methyl
  misc_feature (8)..(8): 2'-deoxy-2'-Fluoro
  misc_feature (9)..(9): 2'-O-methyl
  misc_feature (10)..(12): 2'-deoxy-2'-Fluoro
  misc_feature (13)..(13): 2'-O-methyl
  misc_feature (14)..(19): 2'-deoxy-2'-Fluoro
auucuggcauuuguccucutt

SEQ ID NO: 2150 - DNA, 21 bp, Artificial Sequence
  Synthetic
  misc_feature (2)..(2): 2'-O-methyl
  misc_feature (4)..(4): 2'-deoxy-2'-Fluoro
  misc_feature (5)..(7): 2'-O-methyl
  misc_feature (8)..(10): 2'-deoxy-2'-Fluoro
  misc_feature (11)..(14): 2'-O-methyl
  misc_feature (15)..(18): 2'-deoxy-2'-Fluoro
  misc_feature (19)..(19): 2'-O-methyl
uaucaaauucagaauucugtt

SEQ ID NO: 2151 - DNA, 21 bp, Artificial Sequence
  Synthetic
  misc_feature (3)..(3): 2'-O-methyl
  misc_feature (4)..(5): 2'-deoxy-2'-Fluoro
  misc_feature (6)..(8): 2'-O-methyl
  misc_feature (9)..(11): 2'-deoxy-2'-Fluoro
  misc_feature (12)..(15): 2'-O-methyl
  misc_feature (16)..(19): 2'-deoxy-2'-Fluoro
cuaucaaauucagaauucutt

SEQ ID NO: 2152 - DNA, 21 bp, Artificial Sequence
  Synthetic
  misc_feature (1)..(1): 2'-O-methyl
  misc_feature (4)..(7): 2'-deoxy-2'-Fluoro
  misc_feature (8)..(8): 2'-O-methyl
  misc_feature (9)..(9): 2'-deoxy-2'-Fluoro
  misc_feature (10)..(10): 2'-O-methyl
  misc_feature (11)..(15): 2'-deoxy-2'-Fluoro
  misc_feature (16)..(16): 2'-O-methyl
  misc_feature (17)..(18): 2'-deoxy-2'-Fluoro
  misc_feature (19)..(19): 2'-O-methyl
acccuccauguuucuaucatt

SEQ ID NO: 2153 - DNA, 21 bp, Artificial Sequence
  Synthetic
  misc_feature (4)..(4): 2'-deoxy-2'-Fluoro
  misc_feature (5)..(5): 2'-O-methyl
  misc_feature (6)..(9): 2'-deoxy-2'-Fluoro
  misc_feature (10)..(11): 2'-O-methyl
  misc_feature (12)..(13): 2'-deoxy-2'-Fluoro
  misc_feature (14)..(14): 2'-O-methyl
  misc_feature (15)..(18): 2'-deoxy-2'-Fluoro
  misc_feature (19)..(19): 2'-O-methyl
cuucgcuccaauuacuccatt

SEQ ID NO: 2154 - DNA, 21 bp, Artificial Sequence
  Synthetic
  misc_feature (1)..(1): 2'-O-methyl
  misc_feature (4)..(5): 2'-deoxy-2'-Fluoro
  misc_feature (6)..(6): 2'-O-methyl
  misc_feature (7)..(10): 2'-deoxy-2'-Fluoro
  misc_feature (11)..(12): 2'-O-methyl
  misc_feature (13)..(14): 2'-deoxy-2'-Fluoro
  misc_feature (15)..(15): 2'-O-methyl
  misc_feature (16)..(19): 2'-deoxy-2'-Fluoro
gcuucgcuccaauuacucctt

SEQ ID NO: 2155 - DNA, 21 bp, Artificial Sequence
  Synthetic
  misc_feature (2)..(2): 2'-O-methyl
  misc_feature (4)..(6): 2'-deoxy-2'-Fluoro
  misc_feature (7)..(7): 2'-O-methyl
  misc_feature (8)..(11): 2'-deoxy-2'-Fluoro
  misc_feature (12)..(13): 2'-O-methyl
  misc_feature (14)..(15): 2'-deoxy-2'-Fluoro
  misc_feature (16)..(16): 2'-O-methyl
  misc_feature (17)..(19): 2'-deoxy-2'-Fluoro
cgcuucgcuccaauuacuctt

SEQ ID NO: 2156 - DNA, 21 bp, Artificial Sequence
  Synthetic
  misc_feature (1)..(4): 2'-O-methyl
  misc_feature (5)..(5): 2'-deoxy-2'-Fluoro
  misc_feature (6)..(6): 2'-O-methyl
  misc_feature (7)..(7): 2'-deoxy-2'-Fluoro
  misc_feature (8)..(9): 2'-O-methyl
  misc_feature (10)..(10): 2'-deoxy-2'-Fluoro
  misc_feature (11)..(12): 2'-O-methyl
  misc_feature (13)..(16): 2'-deoxy-2'-Fluoro
  misc_feature (17)..(19): 2'-O-methyl
gaaauauaaugaucuuaagtt

SEQ ID NO: 2157 - DNA, 21 bp, Artificial Sequence
  Synthetic
  misc_feature (1)..(3): 2'-O-methyl
  misc_feature (4)..(5): 2'-deoxy-2'-Fluoro
  misc_feature (6)..(10): 2'-O-methyl
  misc_feature (11)..(12): 2'-deoxy-2'-Fluoro
  misc_feature (13)..(19): 2'-O-methyl
ggaucaggaauuggaggaatt

SEQ ID NO: 2158 - DNA, 21 bp, Artificial Sequence
  Synthetic
  misc_feature (4)..(4): 2'-deoxy-2'-Fluoro
  misc_feature (5)..(5): 2'-O-methyl
  misc_feature (6)..(7): 2'-deoxy-2'-Fluoro
  misc_feature (8)..(11): 2'-O-methyl
  misc_feature (12)..(13): 2'-deoxy-2'-Fluoro
  misc_feature (14)..(18): 2'-O-methyl
  misc_feature (19)..(19): 2'-deoxy-2'-Fluoro
ucuugccaggaucaggaautt

SEQ ID NO: 2159 - DNA, 21 bp, Artificial Sequence
  Synthetic
  misc_feature (1)..(2): 2'-O-methyl
  misc_feature (4)..(6): 2'-deoxy-2'-Fluoro
  misc_feature (7)..(7): 2'-O-methyl
  misc_feature (8)..(9): 2'-deoxy-2'-Fluoro
  misc_feature (10)..(13): 2'-O-methyl
  misc_feature (14)..(15): 2'-deoxy-2'-Fluoro
  misc_feature (16)..(19): 2'-O-methyl
aaucuugccaggaucaggatt

SEQ ID NO: 2160 - DNA, 21 bp, Artificial Sequence
  Synthetic
  misc_feature (1)..(3): 2'-O-methyl
  misc_feature (4)..(7): 2'-deoxy-2'-Fluoro
  misc_feature (8)..(8): 2'-O-methyl
  misc_feature (9)..(10): 2'-deoxy-2'-Fluoro
  misc_feature (11)..(14): 2'-O-methyl
  misc_feature (15)..(16): 2'-deoxy-2'-Fluoro
  misc_feature (17)..(19): 2'-O-methyl
aaaucuugccaggaucaggtt

SEQ ID NO: 2161 - DNA, 21 bp, Artificial Sequence
  Synthetic
  misc_feature (4)..(6): 2'-deoxy-2'-Fluoro
  misc_feature (7)..(11): 2'-O-methyl
  misc_feature (12)..(15): 2'-deoxy-2'-Fluoro
  misc_feature (16)..(16): 2'-O-methyl
  misc_feature (17)..(18): 2'-deoxy-2'-Fluoro
  misc_feature (19)..(19): 2'-O-methyl
uucuuuaaaaaucuugccatt

SEQ ID NO: 2162 - DNA, 21 bp, Artificial Sequence
  Synthetic
  misc_feature (4)..(4): 2'-deoxy-2'-Fluoro
  misc_feature (5)..(7): 2'-O-methyl
  misc_feature (8)..(8): 2'-deoxy-2'-Fluoro
  misc_feature (9)..(9): 2'-O-methyl
  misc_feature (10)..(16): 2'-deoxy-2'-Fluoro
  misc_feature (17)..(19): 2'-O-methyl
cuccaaacauuucuuuaaatt

SEQ ID NO: 2163 - DNA, 21 bp, Artificial Sequence
  Synthetic
  misc_feature (1)..(1): 2'-O-methyl
  misc_feature (3)..(3): 2'-O-methyl
  misc_feature (4)..(5): 2'-deoxy-2'-Fluoro
  misc_feature (6)..(6): 2'-O-methyl
  misc_feature (7)..(8): 2'-deoxy-2'-Fluoro
  misc_feature (9)..(9): 2'-O-methyl
  misc_feature (10)..(13): 2'-deoxy-2'-Fluoro
  misc_feature (14)..(15): 2'-O-methyl
  misc_feature (16)..(19): 2'-deoxy-2'-Fluoro
guaucaucauucuggucuctt

SEQ ID NO: 2164 - DNA, 21 bp, Artificial Sequence
  Synthetic
  misc_feature (1)..(2): 2'-O-methyl
  misc_feature (4)..(4): 2'-O-methyl
  misc_feature (5)..(6): 2'-deoxy-2'-Fluoro
  misc_feature (7)..(7): 2'-O-methyl
  misc_feature (8)..(9): 2'-deoxy-2'-Fluoro
  misc_feature (10)..(10): 2'-O-methyl
  misc_feature (11)..(14): 2'-deoxy-2'-Fluoro
  misc_feature (15)..(16): 2'-O-methyl
  misc_feature (17)..(19): 2'-deoxy-2'-Fluoro
gguaucaucauucuggucutt

SEQ ID NO: 2165 - DNA, 21 bp, Artificial Sequence
  Synthetic
  misc_feature (2)..(5): 2'-O-methyl
  misc_feature (6)..(6): 2'-deoxy-2'-Fluoro
  misc_feature (7)..(7): 2'-O-methyl
  misc_feature (8)..(9): 2'-deoxy-2'-Fluoro
  misc_feature (10)..(10): 2'-O-methyl
  misc_feature (11)..(12): 2'-deoxy-2'-Fluoro
  misc_feature (13)..(13): 2'-O-methyl
  misc_feature (14)..(17): 2'-deoxy-2'-Fluoro
  misc_feature (18)..(19): 2'-O-methyl
caggguaucaucauucuggtt

SEQ ID NO: 2166 - DNA, 21 bp, Artificial Sequence
  Synthetic
  misc_feature (1)..(1): 2'-O-methyl
  misc_feature (3)..(6): 2'-O-methyl
  misc_feature (7)..(7): 2'-deoxy-2'-Fluoro
  misc_feature (8)..(8): 2'-O-methyl
  misc_feature (9)..(10): 2'-deoxy-2'-Fluoro
  misc_feature (11)..(11): 2'-O-methyl
  misc_feature (12)..(13): 2'-deoxy-2'-Fluoro
  misc_feature (14)..(14): 2'-O-methyl
  misc_feature (15)..(18): 2'-deoxy-2'-Fluoro
  misc_feature (19)..(19): 2'-O-methyl
gcaggguaucaucauucugtt

SEQ ID NO: 2167 - DNA, 21 bp, Artificial Sequence
  Synthetic
  misc_feature (2)..(2): 2'-O-methyl
  misc_feature (4)..(7): 2'-O-methyl
  misc_feature (8)..(8): 2'-deoxy-2'-Fluoro
  misc_feature (9)..(9): 2'-O-methyl
  misc_feature (10)..(11): 2'-deoxy-2'-Fluoro
  misc_feature (12)..(12): 2'-O-methyl
  misc_feature (13)..(14): 2'-deoxy-2'-Fluoro
  misc_feature (15)..(15): 2'-O-methyl
  misc_feature (16)..(19): 2'-deoxy-2'-Fluoro
ugcaggguaucaucauucutt

SEQ ID NO: 2168 - DNA, 21 bp, Artificial Sequence
  Synthetic
  misc_feature (3)..(4): 2'-O-methyl
  misc_feature (5)..(5): 2'-deoxy-2'-Fluoro
  misc_feature (6)..(6): 2'-O-methyl
  misc_feature (7)..(7): 2'-deoxy-2'-Fluoro
  misc_feature (8)..(11): 2'-O-methyl
  misc_feature (12)..(12): 2'-deoxy-2'-Fluoro
  misc_feature (13)..(13): 2'-O-methyl
  misc_feature (14)..(15): 2'-deoxy-2'-Fluoro
  misc_feature (16)..(16): 2'-O-methyl
  misc_feature (17)..(18): 2'-deoxy-2'-Fluoro
  misc_feature (19)..(19): 2'-O-methyl
ccagugcaggguaucaucatt

SEQ ID NO: 2169 - DNA, 21 bp, Artificial Sequence
  Synthetic
uccugauccuggcaagauutt

SEQ ID NO: 2170 - DNA, 21 bp, Artificial Sequence
  Synthetic
aaucuugccaggaucaggatt

SEQ ID NO: 2171 - DNA, 21 bp, Artificial Sequence
  Synthetic
  misc_feature (1)..(1): 5'-3 attached terminal deoxyabasic moeity
  misc_feature (1)..(4): 2'-deoxy
  misc_feature (5)..(6): 2'-deoxy-2'-Fluoro
  misc_feature (7)..(7): 2'-deoxy
  misc_feature (8)..(9): 2'-deoxy-2'-Fluoro
  misc_feature (10)..(11): 2'-deoxy
  misc_feature (12)..(12): 2'-deoxy-2'-Fluoro
  misc_feature (13)..(15): 2'-deoxy
  misc_feature (16)..(19): 2'-deoxy-2'-Fluoro
  misc_feature (21)..(21): 3'-3 attached terminal deoxyabasic moeity
agagcuauugaugggucuctt

SEQ ID NO: 2172 - DNA, 21 bp, Artificial Sequence
  Synthetic
  misc_feature (1)..(1): 5'-3 attached terminal deoxyabasic moeity
  misc_feature (1)..(3): 2'-deoxy
  misc_feature (4)..(5): 2'-deoxy-2'-Fluoro
  misc_feature (6)..(6): 2'-deoxy
  misc_feature (7)..(8): 2'-deoxy-2'-Fluoro
  misc_feature (9)..(10): 2'-deoxy
  misc_feature (11)..(11): 2'-deoxy-2'-Fluoro
  misc_feature (12)..(14): 2'-deoxy
  misc_feature (15)..(18): 2'-deoxy-2'-Fluoro
  misc_feature (19)..(19): 2'-deoxy
  misc_feature (21)..(21): 3'-3 attached terminal deoxyabasic moeity
gagcuauugaugggucucatt

SEQ ID NO: 2173 - DNA, 21 bp, Artificial Sequence
  Synthetic
  misc_feature (1)..(1): 5'-3 attached terminal deoxyabasic moeity
  misc_feature (1)..(7): 2'-deoxy-2'-Fluoro
  misc_feature (8)..(8): 2'-deoxy
  misc_feature (9)..(9): 2'-deoxy-2'-Fluoro
  misc_feature (10)..(10): 2'-deoxy
  misc_feature (11)..(11): 2'-deoxy-2'-Fluoro
  misc_feature (12)..(12): 2'-deoxy
  misc_feature (13)..(13): 2'-deoxy-2'-Fluoro
  misc_feature (14)..(14): 2'-deoxy
  misc_feature (15)..(16): 2'-deoxy-2'-Fluoro
  misc_feature (17)..(19): 2'-deoxy
  misc_feature (21)..(21): 3'-3 attached terminal deoxyabasic moeity
cuuucucauauguaccgggtt

SEQ ID NO: 2174 - DNA, 21 bp, Artificial Sequence
  Synthetic
  misc_feature (1)..(1): 5'-3 attached terminal deoxyabasic moeity
  misc_feature (1)..(1): 2'-deoxy-2'-Fluoro
  misc_feature (2)..(2): 2'-deoxy
  misc_feature (3)..(3): 2'-deoxy-2'-Fluoro
  misc_feature (4)..(4): 2'-deoxy
  misc_feature (5)..(5): 2'-deoxy-2'-Fluoro
  misc_feature (6)..(6): 2'-deoxy
  misc_feature (7)..(7): 2'-deoxy-2'-Fluoro
  misc_feature (8)..(8): 2'-deoxy
  misc_feature (9)..(10): 2'-deoxy-2'-Fluoro
  misc_feature (11)..(15): 2'-deoxy
  misc_feature (16)..(16): 2'-deoxy-2'-Fluoro
  misc_feature (17)..(18): 2'-deoxy
  misc_feature (19)..(19): 2'-deoxy-2'-Fluoro
  misc_feature (21)..(21): 3'-3 attached terminal deoxyabasic moeity
cauauguaccgggaacggutt

SEQ ID NO: 2175 - DNA, 21 bp, Artificial Sequence
  Synthetic
  misc_feature (1)..(1): 5'-3 attached terminal deoxyabasic moeity
  misc_feature (1)..(1): 2'-deoxy
  misc_feature (2)..(4): 2'-deoxy-2'-Fluoro
  misc_feature (5)..(5): 2'-deoxy
  misc_feature (6)..(6): 2'-deoxy-2'-Fluoro
  misc_feature (7)..(9): 2'-deoxy
  misc_feature (10)..(10): 2'-deoxy-2'-Fluoro
  misc_feature (11)..(11): 2'-deoxy
  misc_feature (12)..(12): 2'-deoxy-2'-Fluoro
  misc_feature (13)..(14): 2'-deoxy
  misc_feature (15)..(15): 2'-deoxy-2'-Fluoro
  misc_feature (16)..(17): 2'-deoxy
  misc_feature (18)..(18): 2'-deoxy-2'-Fluoro
  misc_feature (19)..(19): 2'-deoxy
  misc_feature (21)..(21): 3'-3 attached terminal deoxyabasic moeity
auccacggauguaacgacatt

SEQ ID NO: 2176 - DNA, 21 bp, Artificial Sequence
  Synthetic
  misc_feature (1)..(1): 5'-3 attached terminal deoxyabasic moeity
  misc_feature (1)..(1): 2'-deoxy-2'-Fluoro
  misc_feature (2)..(2): 2'-deoxy
  misc_feature (3)..(3): 2'-deoxy-2'-Fluoro
  misc_feature (4)..(5): 2'-deoxy
  misc_feature (6)..(6): 2'-deoxy-2'-Fluoro
  misc_feature (7)..(8): 2'-deoxy
  misc_feature (9)..(9): 2'-deoxy-2'-Fluoro
  misc_feature (10)..(11): 2'-deoxy
  misc_feature (12)..(17): 2'-deoxy-2'-Fluoro
  misc_feature (18)..(19): 2'-deoxy
  misc_feature (21)..(21): 3'-3 attached terminal deoxyabasic moeity
uguaacgacagcccucugatt

SEQ ID NO: 2177 - DNA, 21 bp, Artificial Sequence
  Synthetic
  misc_feature (1)..(1): 5'-3 attached terminal deoxyabasic moeity
  misc_feature (1)..(1): 2'-deoxy-2'-Fluoro
  misc_feature (2)..(3): 2'-deoxy
  misc_feature (4)..(4): 2'-deoxy-2'-Fluoro
  misc_feature (5)..(6): 2'-deoxy
  misc_feature (7)..(12): 2'-deoxy-2'-Fluoro
  misc_feature (13)..(19): 2'-deoxy
  misc_feature (21)..(21): 3'-3 attached terminal deoxyabasic moeity
cgacagcccucugagagagtt

SEQ ID NO: 2178 - DNA, 21 bp, Artificial Sequence
  Synthetic
  misc_feature (1)..(1): 5'-3 attached terminal deoxyabasic moeity
  misc_feature (1)..(2): 2'-deoxy-2'-Fluoro
  misc_feature (3)..(5): 2'-deoxy
  misc_feature (6)..(7): 2'-deoxy-2'-Fluoro
  misc_feature (8)..(8): 2'-deoxy
  misc_feature (9)..(9): 2'-deoxy-2'-Fluoro
  misc_feature (10)..(19): 2'-deoxy
  misc_feature (21)..(21): 3'-3 attached terminal deoxyabasic moeity
ccaggucacagaaaaagggtt

SEQ ID NO: 2179 - DNA, 21 bp, Artificial Sequence
  Synthetic
  misc_feature (1)..(1): 5'-3 attached terminal deoxyabasic moeity
  misc_feature (1)..(3): 2'-deoxy
  misc_feature (4)..(5): 2'-deoxy-2'-Fluoro
  misc_feature (6)..(6): 2'-deoxy
  misc_feature (7)..(7): 2'-deoxy-2'-Fluoro
  misc_feature (8)..(18): 2'-deoxy
  misc_feature (19)..(19): 2'-deoxy-2'-Fluoro
  misc_feature (21)..(21): 3'-3 attached terminal deoxyabasic moeity
aggucacagaaaaagggactt

SEQ ID NO: 2180 - DNA, 21 bp, Artificial Sequence
  Synthetic
  misc_feature (1)..(1): 5'-3 attached terminal deoxyabasic moeity
  misc_feature (1)..(1): 2'-deoxy
  misc_feature (2)..(3): 2'-deoxy-2'-Fluoro
  misc_feature (4)..(4): 2'-deoxy
  misc_feature (5)..(5): 2'-deoxy-2'-Fluoro
  misc_feature (6)..(16): 2'-deoxy
  misc_feature (17)..(19): 2'-deoxy-2'-Fluoro
  misc_feature (21)..(21): 3'-3 attached terminal deoxyabasic moeity
gucacagaaaaagggacuctt

SEQ ID NO: 2181 - DNA, 21 bp, Artificial Sequence
  Synthetic
  misc_feature (1)..(1): 5'-3 attached terminal deoxyabasic moeity
  misc_feature (1)..(4): 2'-deoxy
  misc_feature (5)..(8): 2'-deoxy-2'-Fluoro
  misc_feature (9)..(9): 2'-deoxy
  misc_feature (10)..(10): 2'-deoxy-2'-Fluoro
  misc_feature (11)..(11): 2'-deoxy
  misc_feature (12)..(12): 2'-deoxy-2'-Fluoro
  misc_feature (13)..(13): 2'-deoxy
  misc_feature (14)..(15): 2'-deoxy-2'-Fluoro
  misc_feature (16)..(19): 2'-deoxy
  misc_feature (21)..(21): 3'-3 attached terminal deoxyabasic moeity
gggacuccaugcaccgagatt

SEQ ID NO: 2182 - DNA, 21 bp, Artificial Sequence
  Synthetic
  misc_feature (1)..(1): 5'-3 attached terminal deoxyabasic moeity
  misc_feature (1)..(4): 2'-deoxy
  misc_feature (5)..(5): 2'-deoxy-2'-Fluoro
  misc_feature (6)..(6): 2'-deoxy
  misc_feature (7)..(9): 2'-deoxy-2'-Fluoro
  misc_feature (10)..(10): 2'-deoxy
  misc_feature (11)..(11): 2'-deoxy-2'-Fluoro
  misc_feature (12)..(12): 2'-deoxy
  misc_feature (13)..(14): 2'-deoxy-2'-Fluoro
  misc_feature (15)..(17): 2'-deoxy
  misc_feature (18)..(18): 2'-deoxy-2'-Fluoro
  misc_feature (19)..(19): 2'-deoxy
  misc_feature (21)..(21): 3'-3 attached terminal deoxyabasic moeity
gagauguuuguaccagacgtt

SEQ ID NO: 2183 - DNA, 21 bp, Artificial Sequence
  Synthetic
  misc_feature (1)..(1): 5'-3 attached terminal deoxyabasic moeity
  misc_feature (1)..(3): 2'-deoxy
  misc_feature (4)..(4): 2'-deoxy-2'-Fluoro
  misc_feature (5)..(5): 2'-deoxy
  misc_feature (6)..(8): 2'-deoxy-2'-Fluoro
  misc_feature (9)..(9): 2'-deoxy
  misc_feature (10)..(10): 2'-deoxy-2'-Fluoro
  misc_feature (11)..(11): 2'-deoxy
  misc_feature (12)..(13): 2'-deoxy-2'-Fluoro
  misc_feature (14)..(16): 2'-deoxy
  misc_feature (17)..(17): 2'-deoxy-2'-Fluoro
  misc_feature (18)..(18): 2'-deoxy
  misc_feature (19)..(19): 2'-deoxy-2'-Fluoro
  misc_feature (21)..(21): 3'-3 attached terminal deoxyabasic moeity
agauguuuguaccagacgutt

SEQ ID NO: 2184 - DNA, 21 bp, Artificial Sequence
  Synthetic
  misc_feature (1)..(1): 5'-3 attached terminal deoxyabasic moeity
  misc_feature (1)..(2): 2'-deoxy
  misc_feature (3)..(3): 2'-deoxy-2'-Fluoro
  misc_feature (4)..(4): 2'-deoxy
  misc_feature (5)..(9): 2'-deoxy-2'-Fluoro
  misc_feature (10)..(10): 2'-deoxy
  misc_feature (11)..(11): 2'-deoxy-2'-Fluoro
  misc_feature (12)..(13): 2'-deoxy
  misc_feature (14)..(14): 2'-deoxy-2'-Fluoro
  misc_feature (15)..(16): 2'-deoxy
  misc_feature (17)..(17): 2'-deoxy-2'-Fluoro
  misc_feature (18)..(19): 2'-deoxy
  misc_feature (21)..(21): 3'-3 attached terminal deoxyabasic moeity
gacguccuuacggcaacaatt

SEQ ID NO: 2185 - DNA, 21 bp, Artificial Sequence
  Synthetic
  misc_feature (1)..(1): 5'-3 attached terminal deoxyabasic moeity
  misc_feature (1)..(3): 2'-deoxy
  misc_feature (4)..(6): 2'-deoxy-2'-Fluoro
  misc_feature (7)..(7): 2'-deoxy
  misc_feature (8)..(10): 2'-deoxy-2'-Fluoro
  misc_feature (11)..(11): 2'-deoxy
  misc_feature (12)..(12): 2'-deoxy-2'-Fluoro
  misc_feature (13)..(16): 2'-deoxy
  misc_feature (17)..(19): 2'-deoxy-2'-Fluoro
  misc_feature (21)..(21): 3'-3 attached terminal deoxyabasic moeity
gagcucaucugcagggcuutt

SEQ ID NO: 2186 - DNA, 21 bp, Artificial Sequence
  Synthetic
  misc_feature (1)..(1): 5'-3 attached terminal deoxyabasic moeity
  misc_feature (1)..(2): 2'-deoxy-2'-Fluoro
  misc_feature (3)..(3): 2'-deoxy
  misc_feature (4)..(4): 2'-deoxy-2'-Fluoro
  misc_feature (5)..(8): 2'-deoxy
  misc_feature (9)..(13): 2'-deoxy-2'-Fluoro
  misc_feature (14)..(17): 2'-deoxy
  misc_feature (18)..(18): 2'-deoxy-2'-Fluoro
  misc_feature (19)..(19): 2'-deoxy
  misc_feature (21)..(21): 3'-3 attached terminal deoxyabasic moeity
cugcagggcuuccagggugtt

SEQ ID NO: 2187 - DNA, 21 bp, Artificial Sequence
  Synthetic
  misc_feature (1)..(1): 5'-3 attached terminal deoxyabasic moeity
  misc_feature (1)..(3): 2'-deoxy
  misc_feature (4)..(7): 2'-deoxy-2'-Fluoro
  misc_feature (8)..(8): 2'-deoxy
  misc_feature (9)..(14): 2'-deoxy-2'-Fluoro
  misc_feature (15)..(15): 2'-deoxy
  misc_feature (16)..(16): 2'-deoxy-2'-Fluoro
  misc_feature (17)..(17): 2'-deoxy
  misc_feature (18)..(18): 2'-deoxy-2'-Fluoro
  misc_feature (19)..(19): 2'-deoxy
  misc_feature (21)..(21): 3'-3 attached terminal deoxyabasic moeity
aaauuuuacuucccacgugtt

SEQ ID NO: 2188 - DNA, 21 bp, Artificial Sequence
  Synthetic
  misc_feature (1)..(1): 5'-3 attached terminal deoxyabasic moeity
  misc_feature (1)..(2): 2'-deoxy-2'-Fluoro
  misc_feature (3)..(3): 2'-deoxy
  misc_feature (4)..(4): 2'-deoxy-2'-Fluoro
  misc_feature (5)..(5): 2'-deoxy
  misc_feature (6)..(6): 2'-deoxy-2'-Fluoro
  misc_feature (7)..(8): 2'-deoxy
  misc_feature (9)..(9): 2'-deoxy-2'-Fluoro
  misc_feature (10)..(10): 2'-deoxy
  misc_feature (11)..(11): 2'-deoxy-2'-Fluoro
  misc_feature (12)..(12): 2'-deoxy
  misc_feature (13)..(17): 2'-deoxy-2'-Fluoro
  misc_feature (18)..(18): 2'-deoxy
  misc_feature (19)..(19): 2'-deoxy-2'-Fluoro
  misc_feature (21)..(21): 3'-3 attached terminal deoxyabasic moeity
ccacgugauguaccuccgutt

SEQ ID NO: 2189 - DNA, 21 bp, Artificial Sequence
  Synthetic
  misc_feature (1)..(1): 5'-3 attached terminal deoxyabasic moeity
  misc_feature (1)..(1): 2'-deoxy-2'-Fluoro
  misc_feature (2)..(2): 2'-deoxy
  misc_feature (3)..(3): 2'-deoxy-2'-Fluoro
  misc_feature (4)..(4): 2'-deoxy
  misc_feature (5)..(5): 2'-deoxy-2'-Fluoro
  misc_feature (6)..(7): 2'-deoxy
  misc_feature (8)..(8): 2'-deoxy-2'-Fluoro
  misc_feature (9)..(9): 2'-deoxy
  misc_feature (10)..(10): 2'-deoxy-2'-Fluoro
  misc_feature (11)..(11): 2'-deoxy
  misc_feature (12)..(16): 2'-deoxy-2'-Fluoro
  misc_feature (17)..(17): 2'-deoxy
  misc_feature (18)..(18): 2'-deoxy-2'-Fluoro
  misc_feature (19)..(19): 2'-deoxy
  misc_feature (21)..(21): 3'-3 attached terminal deoxyabasic moeity
cacgugauguaccuccgugtt

SEQ ID NO: 2190 - DNA, 21 bp, Artificial Sequence
  Synthetic
  misc_feature (1)..(1): 5'-3 attached terminal deoxyabasic moeity
  misc_feature (1)..(5): 2'-deoxy-2'-Fluoro
  misc_feature (6)..(6): 2'-deoxy
  misc_feature (7)..(7): 2'-deoxy-2'-Fluoro
  misc_feature (8)..(8): 2'-deoxy
  misc_feature (9)..(11): 2'-deoxy-2'-Fluoro
  misc_feature (12)..(17): 2'-deoxy
  misc_feature (18)..(18): 2'-deoxy-2'-Fluoro
  misc_feature (19)..(19): 2'-deoxy
  misc_feature (21)..(21): 3'-3 attached terminal deoxyabasic moeity
ccuccgugcuugaagaacatt

SEQ ID NO: 2191 - DNA, 21 bp, Artificial Sequence
  Synthetic
  misc_feature (1)..(1): 5'-3 attached terminal deoxyabasic moeity
  misc_feature (1)..(2): 2'-deoxy
  misc_feature (3)..(3): 2'-deoxy-2'-Fluoro
  misc_feature (4)..(6): 2'-deoxy
  misc_feature (7)..(9): 2'-deoxy-2'-Fluoro
  misc_feature (10)..(10): 2'-deoxy
  misc_feature (11)..(11): 2'-deoxy-2'-Fluoro
  misc_feature (12)..(12): 2'-deoxy
  misc_feature (13)..(15): 2'-deoxy-2'-Fluoro
  misc_feature (16)..(16): 2'-deoxy
  misc_feature (17)..(17): 2'-deoxy-2'-Fluoro
  misc_feature (18)..(19): 2'-deoxy
  misc_feature (21)..(21): 3'-3 attached terminal deoxyabasic moeity
aaugaguccacgcucacaatt

SEQ ID NO: 2192 - DNA, 21 bp, Artificial Sequence
  Synthetic
  misc_feature (1)..(1): 5'-3 attached terminal deoxyabasic moeity
  misc_feature (1)..(1): 2'-deoxy-2'-Fluoro
  misc_feature (2)..(2): 2'-deoxy
  misc_feature (3)..(4): 2'-deoxy-2'-Fluoro
  misc_feature (5)..(10): 2'-deoxy
  misc_feature (11)..(16): 2'-deoxy-2'-Fluoro
  misc_feature (17)..(19): 2'-deoxy
  misc_feature (21)..(21): 3'-3 attached terminal deoxyabasic moeity
cacugaaagacuuccuggatt

SEQ ID NO: 2193 - DNA, 21 bp, Artificial Sequence
  Synthetic
  misc_feature (1)..(1): 5'-3 attached terminal deoxyabasic moeity
  misc_feature (1)..(1): 2'-deoxy
  misc_feature (2)..(3): 2'-deoxy-2'-Fluoro
  misc_feature (4)..(9): 2'-deoxy
  misc_feature (10)..(15): 2'-deoxy-2'-Fluoro
  misc_feature (16)..(19): 2'-deoxy
  misc_feature (21)..(21): 3'-3 attached terminal deoxyabasic moeity
acugaaagacuuccuggaatt

SEQ ID NO: 2194 - DNA, 21 bp, Artificial Sequence
  Synthetic
  misc_feature (1)..(1): 5'-3 attached terminal deoxyabasic moeity
  misc_feature (1)..(2): 2'-deoxy-2'-Fluoro
  misc_feature (3)..(8): 2'-deoxy
  misc_feature (9)..(14): 2'-deoxy-2'-Fluoro
  misc_feature (15)..(19): 2'-deoxy
  misc_feature (21)..(21): 3'-3 attached terminal deoxyabasic moeity
cugaaagacuuccuggaaatt

SEQ ID NO: 2195 - DNA, 21 bp, Artificial Sequence
  Synthetic
  misc_feature (1)..(1): 5'-3 attached terminal deoxyabasic moeity
  misc_feature (1)..(1): 2'-deoxy-2'-Fluoro
  misc_feature (2)..(7): 2'-deoxy
  misc_feature (8)..(13): 2'-deoxy-2'-Fluoro
  misc_feature (14)..(19): 2'-deoxy
  misc_feature (21)..(21): 3'-3 attached terminal deoxyabasic moeity
ugaaagacuuccuggaaagtt

SEQ ID NO: 2196 - DNA, 21 bp, Artificial Sequence
  Synthetic
  misc_feature (1)..(1): 5'-3 attached terminal deoxyabasic moeity
  misc_feature (1)..(6): 2'-deoxy
  misc_feature (7)..(12): 2'-deoxy-2'-Fluoro
  misc_feature (13)..(18): 2'-deoxy
  misc_feature (19)..(19): 2'-deoxy-2'-Fluoro
  misc_feature (21)..(21): 3'-3 attached terminal deoxyabasic moeity
gaaagacuuccuggaaagctt

SEQ ID NO: 2197 - DNA, 21 bp, Artificial Sequence
  Synthetic
  misc_feature (1)..(1): 5'-3 attached terminal deoxyabasic moeity
  misc_feature (1)..(5): 2'-deoxy
  misc_feature (6)..(11): 2'-deoxy-2'-Fluoro
  misc_feature (12)..(17): 2'-deoxy
  misc_feature (18)..(19): 2'-deoxy-2'-Fluoro
  misc_feature (21)..(21): 3'-3 attached terminal deoxyabasic moeity
aaagacuuccuggaaagcctt

SEQ ID NO: 2198 - DNA, 21 bp, Artificial Sequence
  Synthetic
  misc_feature (1)..(1): 5'-3 attached terminal deoxyabasic moeity
  misc_feature (1)..(4): 2'-deoxy
  misc_feature (5)..(10): 2'-deoxy-2'-Fluoro
  misc_feature (11)..(16): 2'-deoxy
  misc_feature (17)..(19): 2'-deoxy-2'-Fluoro
  misc_feature (21)..(21): 3'-3 attached terminal deoxyabasic moeity
aagacuuccuggaaagccutt

SEQ ID NO: 2199 - DNA, 21 bp, Artificial Sequence
  Synthetic
  misc_feature (1)..(1): 5'-3 attached terminal deoxyabasic moeity
  misc_feature (1)..(3): 2'-deoxy
  misc_feature (4)..(9): 2'-deoxy-2'-Fluoro
  misc_feature (10)..(15): 2'-deoxy
  misc_feature (16)..(18): 2'-deoxy-2'-Fluoro
  misc_feature (19)..(19): 2'-deoxy
  misc_feature (21)..(21): 3'-3 attached terminal deoxyabasic moeity
agacuuccuggaaagccuatt

SEQ ID NO: 2200 - DNA, 21 bp, Artificial Sequence
  Synthetic
  misc_feature (1)..(1): 5'-3 attached terminal deoxyabasic moeity
  misc_feature (1)..(2): 2'-deoxy
  misc_feature (3)..(8): 2'-deoxy-2'-Fluoro
  misc_feature (9)..(14): 2'-deoxy
  misc_feature (15)..(17): 2'-deoxy-2'-Fluoro
  misc_feature (18)..(19): 2'-deoxy
  misc_feature (21)..(21): 3'-3 attached terminal deoxyabasic moeity
gacuuccuggaaagccuaatt

SEQ ID NO: 2201 - DNA, 21 bp, Artificial Sequence
  Synthetic
  misc_feature (1)..(1): 5'-3 attached terminal deoxyabasic moeity
  misc_feature (1)..(1): 2'-deoxy
  misc_feature (2)..(7): 2'-deoxy-2'-Fluoro
  misc_feature (8)..(13): 2'-deoxy
  misc_feature (14)..(16): 2'-deoxy-2'-Fluoro
  misc_feature (17)..(19): 2'-deoxy
  misc_feature (21)..(21): 3'-3 attached terminal deoxyabasic moeity
acuuccuggaaagccuaaatt

SEQ ID NO: 2202 - DNA, 21 bp, Artificial Sequence
  Synthetic
  misc_feature (1)..(1): 5'-3 attached terminal deoxyabasic moeity
  misc_feature (1)..(1): 2'-deoxy-2'-Fluoro
  misc_feature (2)..(7): 2'-deoxy
  misc_feature (8)..(8): 2'-deoxy-2'-Fluoro
  misc_feature (9)..(9): 2'-deoxy
  misc_feature (10)..(13): 2'-deoxy-2'-Fluoro
  misc_feature (14)..(14): 2'-deoxy
  misc_feature (15)..(15): 2'-deoxy-2'-Fluoro
  misc_feature (16)..(19): 2'-deoxy
  misc_feature (21)..(21): 3'-3 attached terminal deoxyabasic moeity
uaaaaagcauccuacgaggtt

SEQ ID NO: 2203 - DNA, 21 bp, Artificial Sequence
  Synthetic
  misc_feature (1)..(4): 2'-O-methyl
  misc_feature (5)..(7): 2'-deoxy-2'-Fluoro
  misc_feature (8)..(8): 2'-O-methyl
  misc_feature (9)..(10): 2'-deoxy-2'-Fluoro
  misc_feature (11)..(12): 2'-O-methyl
  misc_feature (13)..(13): 2'-deoxy-2'-Fluoro
  misc_feature (14)..(15): 2'-O-methyl
  misc_feature (16)..(19): 2'-deoxy-2'-Fluoro
gagacccaucaauagcucutt

SEQ ID NO: 2204 - DNA, 21 bp, Artificial Sequence
  Synthetic
  misc_feature (2)..(5): 2'-O-methyl
  misc_feature (6)..(8): 2'-deoxy-2'-Fluoro
  misc_feature (9)..(9): 2'-O-methyl
  misc_feature (10)..(11): 2'-deoxy-2'-Fluoro
  misc_feature (12)..(13): 2'-O-methyl
  misc_feature (14)..(14): 2'-deoxy-2'-Fluoro
  misc_feature (15)..(16): 2'-O-methyl
  misc_feature (17)..(19): 2'-deoxy-2'-Fluoro
ugagacccaucaauagcuctt

SEQ ID NO: 2205 - DNA, 21 bp, Artificial Sequence
  Synthetic
  misc_feature (4)..(5): 2'-O-methyl
  misc_feature (6)..(6): 2'-deoxy-2'-Fluoro
  misc_feature (7)..(7): 2'-O-methyl
  misc_feature (8)..(8): 2'-deoxy-2'-Fluoro
  misc_feature (9)..(9): 2'-O-methyl
  misc_feature (10)..(10): 2'-deoxy-2'-Fluoro
  misc_feature (11)..(11): 2'-O-methyl
  misc_feature (12)..(12): 2'-deoxy-2'-Fluoro
  misc_feature (13)..(19): 2'-O-methyl
cccgguacauaugagaaagtt

SEQ ID NO: 2206 - DNA, 21 bp, Artificial Sequence
  Synthetic
  misc_feature (1)..(1): 2'-O-methyl
  misc_feature (4)..(4): 2'-O-methyl
  misc_feature (5)..(9): 2'-deoxy-2'-Fluoro
  misc_feature (10)..(11): 2'-O-methyl
  misc_feature (12)..(12): 2'-deoxy-2'-Fluoro
  misc_feature (13)..(13): 2'-O-methyl
  misc_feature (14)..(14): 2'-deoxy-2'-Fluoro
  misc_feature (15)..(15): 2'-O-methyl
  misc_feature (16)..(16): 2'-deoxy-2'-Fluoro
  misc_feature (17)..(17): 2'-O-methyl
  misc_feature (18)..(18): 2'-deoxy-2'-Fluoro
  misc_feature (19)..(19): 2'-O-methyl
accguucccgguacauaugtt

SEQ ID NO: 2207 - DNA, 21 bp, Artificial Sequence
  Synthetic
  misc_feature (2)..(2): 2'-O-methyl
  misc_feature (4)..(4): 2'-deoxy-2'-Fluoro
  misc_feature (5)..(5): 2'-O-methyl
  misc_feature (6)..(7): 2'-deoxy-2'-Fluoro
  misc_feature (8)..(8): 2'-O-methyl
  misc_feature (9)..(9): 2'-deoxy-2'-Fluoro
  misc_feature (10)..(10): 2'-O-methyl
  misc_feature (11)..(13): 2'-deoxy-2'-Fluoro
  misc_feature (14)..(14): 2'-O-methyl
  misc_feature (15)..(15): 2'-deoxy-2'-Fluoro
  misc_feature (16)..(18): 2'-O-methyl
  misc_feature (19)..(19): 2'-deoxy-2'-Fluoro
ugucguuacauccguggautt

SEQ ID NO: 2208 - DNA, 21 bp, Artificial Sequence
  Synthetic
  misc_feature (3)..(8): 2'-O-methyl
  misc_feature (9)..(10): 2'-deoxy-2'-Fluoro
  misc_feature (11)..(11): 2'-O-methyl
  misc_feature (12)..(13): 2'-deoxy-2'-Fluoro
  misc_feature (14)..(14): 2'-O-methyl
  misc_feature (15)..(16): 2'-deoxy-2'-Fluoro
  misc_feature (17)..(17): 2'-O-methyl
  misc_feature (18)..(18): 2'-deoxy-2'-Fluoro
  misc_feature (19)..(19): 2'-O-methyl
ucagagggcugucguuacatt

SEQ ID NO: 2209 - DNA, 21 bp, Artificial Sequence
  Synthetic
  misc_feature (4)..(7): 2'-deoxy-2'-Fluoro
  misc_feature (8)..(13): 2'-O-methyl
  misc_feature (14)..(15): 2'-deoxy-2'-Fluoro
  misc_feature (16)..(16): 2'-O-methyl
  misc_feature (17)..(18): 2'-deoxy-2'-Fluoro
  misc_feature (19)..(19): 2'-O-methyl
cucucucagagggcugucgtt

SEQ ID NO: 2210 - DNA, 21 bp, Artificial Sequence
  Synthetic
  misc_feature (4)..(10): 2'-deoxy-2'-Fluoro
  misc_feature (11)..(11): 2'-O-methyl
  misc_feature (12)..(12): 2'-deoxy-2'-Fluoro
  misc_feature (13)..(14): 2'-O-methyl
  misc_feature (15)..(17): 2'-deoxy-2'-Fluoro
  misc_feature (18)..(19): 2'-O-methyl
cccuuuuucugugaccuggtt

SEQ ID NO: 2211 - DNA, 21 bp, Artificial Sequence
  Synthetic
  misc_feature (1)..(1): 2'-O-methyl
  misc_feature (4)..(12): 2'-deoxy-2'-Fluoro
  misc_feature (13)..(13): 2'-O-methyl
  misc_feature (14)..(14): 2'-deoxy-2'-Fluoro
  misc_feature (15)..(16): 2'-O-methyl
  misc_feature (17)..(19): 2'-deoxy-2'-Fluoro
gucccuuuuucugugaccutt

SEQ ID NO: 2212 - DNA, 21 bp, Artificial Sequence
  Synthetic
  misc_feature (1)..(3): 2'-O-methyl
  misc_feature (4)..(14): 2'-deoxy-2'-Fluoro
  misc_feature (15)..(15): 2'-O-methyl
  misc_feature (16)..(16): 2'-deoxy-2'-Fluoro
  misc_feature (17)..(18): 2'-O-methyl
  misc_feature (19)..(19): 2'-deoxy-2'-Fluoro
gagucccuuuuucugugactt

SEQ ID NO: 2213 - DNA, 21 bp, Artificial Sequence
  Synthetic
  misc_feature (4)..(4): 2'-deoxy-2'-Fluoro
  misc_feature (5)..(6): 2'-O-methyl
  misc_feature (7)..(7): 2'-deoxy-2'-Fluoro
  misc_feature (8)..(8): 2'-O-methyl
  misc_feature (9)..(9): 2'-deoxy-2'-Fluoro
  misc_feature (10)..(10): 2'-O-methyl
  misc_feature (11)..(11): 2'-deoxy-2'-Fluoro
  misc_feature (12)..(15): 2'-O-methyl
  misc_feature (16)..(19): 2'-deoxy-2'-Fluoro
ucucggugcauggaguccctt

SEQ ID NO: 2214 - DNA, 21 bp, Artificial Sequence
  Synthetic
  misc_feature (2)..(2): 2'-O-methyl
  misc_feature (4)..(5): 2'-deoxy-2'-Fluoro
  misc_feature (6)..(7): 2'-O-methyl
  misc_feature (8)..(8): 2'-deoxy-2'-Fluoro
  misc_feature (9)..(9): 2'-O-methyl
  misc_feature (10)..(10): 2'-deoxy-2'-Fluoro
  misc_feature (11)..(13): 2'-O-methyl
  misc_feature (14)..(14): 2'-deoxy-2'-Fluoro
  misc_feature (15)..(15): 2'-O-methyl
  misc_feature (16)..(19): 2'-deoxy-2'-Fluoro
cgucugguacaaacaucuctt

SEQ ID NO: 2215 - DNA, 21 bp, Artificial Sequence
  Synthetic
  misc_feature (1)..(1): 2'-O-methyl
  misc_feature (3)..(3): 2'-O-methyl
  misc_feature (4)..(6): 2'-deoxy-2'-Fluoro
  misc_feature (7)..(8): 2'-O-methyl
  misc_feature (9)..(9): 2'-deoxy-2'-Fluoro
  misc_feature (10)..(10): 2'-O-methyl
  misc_feature (11)..(11): 2'-deoxy-2'-Fluoro
  misc_feature (12)..(14): 2'-O-methyl
  misc_feature (15)..(15): 2'-deoxy-2'-Fluoro
  misc_feature (16)..(16): 2'-O-methyl
  misc_feature (17)..(19): 2'-deoxy-2'-Fluoro
acgucugguacaaacaucutt

SEQ ID NO: 2216 - DNA, 21 bp, Artificial Sequence
  Synthetic
  misc_feature (3)..(3): 2'-O-methyl
  misc_feature (4)..(5): 2'-deoxy-2'-Fluoro
  misc_feature (6)..(6): 2'-O-methyl
  misc_feature (7)..(8): 2'-deoxy-2'-Fluoro
  misc_feature (9)..(9): 2'-O-methyl
  misc_feature (10)..(10): 2'-deoxy-2'-Fluoro
  misc_feature (11)..(15): 2'-O-methyl
  misc_feature (16)..(16): 2'-deoxy-2'-Fluoro
  misc_feature (17)..(17): 2'-O-methyl
  misc_feature (18)..(19): 2'-deoxy-2'-Fluoro
uuguugccguaaggacguctt

SEQ ID NO: 2217 - DNA, 21 bp, Artificial Sequence
  Synthetic
  misc_feature (1)..(3): 2'-O-methyl
  misc_feature (4)..(7): 2'-deoxy-2'-Fluoro
  misc_feature (8)..(8): 2'-O-methyl
  misc_feature (9)..(9): 2'-deoxy-2'-Fluoro
  misc_feature (10)..(12): 2'-O-methyl
  misc_feature (13)..(13): 2'-deoxy-2'-Fluoro
  misc_feature (14)..(16): 2'-O-methyl
  misc_feature (17)..(19): 2'-deoxy-2'-Fluoro
aagcccugcagaugagcuctt

SEQ ID NO: 2218 - DNA, 21 bp, Artificial Sequence
  Synthetic
  misc_feature (2)..(2): 2'-O-methyl
  misc_feature (4)..(6): 2'-deoxy-2'-Fluoro
  misc_feature (7)..(11): 2'-O-methyl
  misc_feature (12)..(15): 2'-deoxy-2'-Fluoro
  misc_feature (16)..(16): 2'-O-methyl
  misc_feature (17)..(17): 2'-deoxy-2'-Fluoro
  misc_feature (18)..(19): 2'-O-methyl
cacccuggaagcccugcagtt

SEQ ID NO: 2219 - DNA, 21 bp, Artificial Sequence
  Synthetic
  misc_feature (2)..(2): 2'-O-methyl
  misc_feature (4)..(4): 2'-O-methyl
  misc_feature (5)..(5): 2'-deoxy-2'-Fluoro
  misc_feature (6)..(11): 2'-O-methyl
  misc_feature (12)..(12): 2'-deoxy-2'-Fluoro
  misc_feature (13)..(16): 2'-O-methyl
  misc_feature (17)..(19): 2'-deoxy-2'-Fluoro
cacgugggaaguaaaauuutt

SEQ ID NO: 2220 - DNA, 21 bp, Artificial Sequence
  Synthetic
  misc_feature (1)..(1): 2'-O-methyl
  misc_feature (3)..(7): 2'-O-methyl
  misc_feature (8)..(8): 2'-deoxy-2'-Fluoro
  misc_feature (9)..(9): 2'-O-methyl
  misc_feature (10)..(10): 2'-deoxy-2'-Fluoro
  misc_feature (11)..(11): 2'-O-methyl
  misc_feature (12)..(13): 2'-deoxy-2'-Fluoro
  misc_feature (14)..(14): 2'-O-methyl
  misc_feature (15)..(15): 2'-deoxy-2'-Fluoro
  misc_feature (16)..(16): 2'-O-methyl
  misc_feature (17)..(17): 2'-deoxy-2'-Fluoro
  misc_feature (18)..(19): 2'-O-methyl
acggagguacaucacguggtt

SEQ ID NO: 2221 - DNA, 21 bp, Artificial Sequence
  Synthetic
  misc_feature (2)..(2): 2'-O-methyl
  misc_feature (4)..(8): 2'-O-methyl
  misc_feature (9)..(9): 2'-deoxy-2'-Fluoro
  misc_feature (10)..(10): 2'-O-methyl
  misc_feature (11)..(11): 2'-deoxy-2'-Fluoro
  misc_feature (12)..(12): 2'-O-methyl
  misc_feature (13)..(14): 2'-deoxy-2'-Fluoro
  misc_feature (15)..(15): 2'-O-methyl
  misc_feature (16)..(16): 2'-deoxy-2'-Fluoro
  misc_feature (17)..(17): 2'-O-methyl
  misc_feature (18)..(18): 2'-deoxy-2'-Fluoro
  misc_feature (19)..(19): 2'-O-methyl
cacggagguacaucacgugtt

SEQ ID NO: 2222 - DNA, 21 bp, Artificial Sequence
  Synthetic
  misc_feature (2)..(2): 2'-O-methyl
  misc_feature (4)..(8): 2'-deoxy-2'-Fluoro
  misc_feature (9)..(11): 2'-O-methyl
  misc_feature (12)..(12): 2'-deoxy-2'-Fluoro
  misc_feature (13)..(13): 2'-O-methyl
  misc_feature (14)..(14): 2'-deoxy-2'-Fluoro
  misc_feature (15)..(19): 2'-O-methyl
uguucuucaagcacggaggtt

SEQ ID NO: 2223 - DNA, 21 bp, Artificial Sequence
  Synthetic
  misc_feature (3)..(3): 2'-O-methyl
  misc_feature (4)..(4): 2'-deoxy-2'-Fluoro
  misc_feature (5)..(7): 2'-O-methyl
  misc_feature (8)..(8): 2'-deoxy-2'-Fluoro
  misc_feature (9)..(9): 2'-O-methyl
  misc_feature (10)..(10): 2'-deoxy-2'-Fluoro
  misc_feature (11)..(13): 2'-O-methyl
  misc_feature (14)..(16): 2'-deoxy-2'-Fluoro
  misc_feature (17)..(17): 2'-O-methyl
  misc_feature (18)..(19): 2'-deoxy-2'-Fluoro
uugugagcguggacucauutt

SEQ ID NO: 2224 - DNA, 21 bp, Artificial Sequence
  Synthetic
  misc_feature (4)..(9): 2'-O-methyl
  misc_feature (10)..(15): 2'-deoxy-2'-Fluoro
  misc_feature (16)..(17): 2'-O-methyl
  misc_feature (18)..(18): 2'-deoxy-2'-Fluoro
  misc_feature (19)..(19): 2'-O-methyl
uccaggaagucuuucagugtt

SEQ ID NO: 2225 - DNA, 21 bp, Artificial Sequence
  Synthetic
  misc_feature (4)..(4): 2'-deoxy-2'-Fluoro
  misc_feature (5)..(10): 2'-O-methyl
  misc_feature (11)..(16): 2'-deoxy-2'-Fluoro
  misc_feature (17)..(18): 2'-O-methyl
  misc_feature (19)..(19): 2'-deoxy-2'-Fluoro
uuccaggaagucuuucagutt

SEQ ID NO: 2226 - DNA, 21 bp, Artificial Sequence
  Synthetic
  misc_feature (4)..(5): 2'-deoxy-2'-Fluoro
  misc_feature (6)..(11): 2'-O-methyl
  misc_feature (12)..(17): 2'-deoxy-2'-Fluoro
  misc_feature (18)..(19): 2'-O-methyl
uuuccaggaagucuuucagtt

SEQ ID NO: 2227 - DNA, 21 bp, Artificial Sequence
  Synthetic
  misc_feature (4)..(6): 2'-deoxy-2'-Fluoro
  misc_feature (7)..(12): 2'-O-methyl
  misc_feature (13)..(18): 2'-deoxy-2'-Fluoro
  misc_feature (19)..(19): 2'-O-methyl
cuuuccaggaagucuuucatt

SEQ ID NO: 2228 - DNA, 21 bp, Artificial Sequence
  Synthetic
  misc_feature (1)..(1): 2'-O-methyl
  misc_feature (4)..(7): 2'-deoxy-2'-Fluoro
  misc_feature (8)..(13): 2'-O-methyl
  misc_feature (14)..(19): 2'-deoxy-2'-Fluoro
gcuuuccaggaagucuuuctt

SEQ ID NO: 2229 - DNA, 21 bp, Artificial Sequence
  Synthetic
  misc_feature (1)..(2): 2'-O-methyl
  misc_feature (4)..(8): 2'-deoxy-2'-Fluoro
  misc_feature (9)..(14): 2'-O-methyl
  misc_feature (15)..(19): 2'-deoxy-2'-Fluoro
ggcuuuccaggaagucuuutt

SEQ ID NO: 2230 - DNA, 21 bp, Artificial Sequence
  Synthetic
  misc_feature (1)..(3): 2'-O-methyl
  misc_feature (4)..(9): 2'-deoxy-2'-Fluoro
  misc_feature (10)..(15): 2'-O-methyl
  misc_feature (16)..(19): 2'-deoxy-2'-Fluoro
aggcuuuccaggaagucuutt

SEQ ID NO: 2231 - DNA, 21 bp, Artificial Sequence
  Synthetic
  misc_feature (2)..(4): 2'-O-methyl
  misc_feature (5)..(10): 2'-deoxy-2'-Fluoro
  misc_feature (11)..(16): 2'-O-methyl
  misc_feature (17)..(19): 2'-deoxy-2'-Fluoro
uaggcuuuccaggaagucutt

SEQ ID NO: 2232 - DNA, 21 bp, Artificial Sequence
  Synthetic
  misc_feature (3)..(5): 2'-O-methyl
  misc_feature (6)..(11): 2'-deoxy-2'-Fluoro
  misc_feature (12)..(17): 2'-O-methyl
  misc_feature (18)..(19): 2'-deoxy-2'-Fluoro
uuaggcuuuccaggaaguctt

SEQ ID NO: 2233 - DNA, 21 bp, Artificial Sequence
  Synthetic
  misc_feature (4)..(6): 2'-O-methyl
  misc_feature (7)..(12): 2'-deoxy-2'-Fluoro
  misc_feature (13)..(18): 2'-O-methyl
  misc_feature (19)..(19): 2'-deoxy-2'-Fluoro
uuuaggcuuuccaggaagutt

SEQ ID NO: 2234 - DNA, 21 bp, Artificial Sequence
  Synthetic
  misc_feature (4)..(4): 2'-deoxy-2'-Fluoro
  misc_feature (5)..(5): 2'-O-methyl
  misc_feature (6)..(6): 2'-deoxy-2'-Fluoro
  misc_feature (7)..(10): 2'-O-methyl
  misc_feature (11)..(11): 2'-deoxy-2'-Fluoro
  misc_feature (12)..(12): 2'-O-methyl
  misc_feature (13)..(18): 2'-deoxy-2'-Fluoro
  misc_feature (19)..(19): 2'-O-methyl
ccucguaggaugcuuuuuatt

SEQ ID NO: 2235 - DNA, 21 bp, Artificial Sequence
  Synthetic
cugaaagacuuccuggaaatt

SEQ ID NO: 2236 - DNA, 21 bp, Artificial Sequence
  Synthetic
uuuccaggaagucuuucagtt

SEQ ID NO: 2237 - DNA, 21 bp, Artificial Sequence
  Synthetic
gagcuauugaugggucucatt

SEQ ID NO: 2238 - DNA, 21 bp, Artificial Sequence
  Synthetic
aagacuuccuggaaagccutt

SEQ ID NO: 2239 - DNA, 21 bp, Artificial Sequence
  Synthetic
agacuuccuggaaagccuatt

SEQ ID NO: 2240 - DNA, 21 bp, Artificial Sequence
  Synthetic
ugagacccaucaauagcuctt

SEQ ID NO: 2241 - DNA, 21 bp, Artificial Sequence
  Synthetic
aggcuuuccaggaagucuutt

SEQ ID NO: 2242 - DNA, 21 bp, Artificial Sequence
  Synthetic
uaggcuuuccaggaagucutt

SEQ ID NO: 2243 - DNA, 21 bp, Artificial Sequence
  Synthetic
  misc_feature (1)..(1): 5'-3 attached terminal deoxyabasic moeity
  misc_feature (1)..(3): 2'-deoxy-2'-Fluoro
  misc_feature (4)..(4): 2'-deoxy
  misc_feature (5)..(7): 2'-deoxy-2'-Fluoro
  misc_feature (8)..(8): 2'-deoxy
  misc_feature (9)..(15): 2'-deoxy-2'-Fluoro
  misc_feature (16)..(17): 2'-deoxy
  misc_feature (18)..(19): 2'-deoxy-2'-Fluoro
  misc_feature (21)..(21): 3'-3 attached terminal deoxyabasic moeity
cccaccugcuucucugacutt

SEQ ID NO: 2244 - DNA, 21 bp, Artificial Sequence
  Synthetic
  misc_feature (1)..(1): 5'-3 attached terminal deoxyabasic moeity
  misc_feature (1)..(1): 2'-deoxy-2'-Fluoro
  misc_feature (2)..(2): 2'-deoxy
  misc_feature (3)..(5): 2'-deoxy-2'-Fluoro
  misc_feature (6)..(6): 2'-deoxy
  misc_feature (7)..(13): 2'-deoxy-2'-Fluoro
  misc_feature (14)..(15): 2'-deoxy
  misc_feature (16)..(17): 2'-deoxy-2'-Fluoro
  misc_feature (18)..(18): 2'-deoxy
  misc_feature (19)..(19): 2'-deoxy-2'-Fluoro
  misc_feature (21)..(21): 3'-3 attached terminal deoxyabasic moeity
caccugcuucucugacuactt

SEQ ID NO: 2245 - DNA, 21 bp, Artificial Sequence
  Synthetic
  misc_feature (1)..(1): 5'-3 attached terminal deoxyabasic moeity
  misc_feature (1)..(2): 2'-deoxy-2'-Fluoro
  misc_feature (3)..(3): 2'-deoxy
  misc_feature (4)..(10): 2'-deoxy-2'-Fluoro
  misc_feature (11)..(12): 2'-deoxy
  misc_feature (13)..(14): 2'-deoxy-2'-Fluoro
  misc_feature (15)..(15): 2'-deoxy
  misc_feature (16)..(16): 2'-deoxy-2'-Fluoro
  misc_feature (17)..(17): 2'-deoxy
  misc_feature (18)..(19): 2'-deoxy-2'-Fluoro
  misc_feature (21)..(21): 3'-3 attached terminal deoxyabasic moeity
cugcuucucugacuacauctt

SEQ ID NO: 2246 - DNA, 21 bp, Artificial Sequence
  Synthetic
  misc_feature (1)..(1): 5'-3 attached terminal deoxyabasic moeity
  misc_feature (1)..(1): 2'-deoxy-2'-Fluoro
  misc_feature (2)..(2): 2'-deoxy
  misc_feature (3)..(9): 2'-deoxy-2'-Fluoro
  misc_feature (10)..(11): 2'-deoxy
  misc_feature (12)..(13): 2'-deoxy-2'-Fluoro
  misc_feature (14)..(14): 2'-deoxy
  misc_feature (15)..(15): 2'-deoxy-2'-Fluoro
  misc_feature (16)..(16): 2'-deoxy
  misc_feature (17)..(19): 2'-deoxy-2'-Fluoro
  misc_feature (21)..(21): 3'-3 attached terminal deoxyabasic moeity
ugcuucucugacuacaucctt

SEQ ID NO: 2247 - DNA, 21 bp, Artificial Sequence
  Synthetic
  misc_feature (1)..(1): 5'-3 attached terminal deoxyabasic moeity
  misc_feature (1)..(1): 2'-deoxy
  misc_feature (2)..(8): 2'-deoxy-2'-Fluoro
  misc_feature (9)..(10): 2'-deoxy
  misc_feature (11)..(12): 2'-deoxy-2'-Fluoro
  misc_feature (13)..(13): 2'-deoxy
  misc_feature (14)..(14): 2'-deoxy-2'-Fluoro
  misc_feature (15)..(15): 2'-deoxy
  misc_feature (16)..(18): 2'-deoxy-2'-Fluoro
  misc_feature (19)..(19): 2'-deoxy
  misc_feature (21)..(21): 3'-3 attached terminal deoxyabasic moeity
gcuucucugacuacauccgtt

SEQ ID NO: 2248 - DNA, 21 bp, Artificial Sequence
  Synthetic
  misc_feature (1)..(1): 5'-3 attached terminal deoxyabasic moeity
  misc_feature (1)..(7): 2'-deoxy-2'-Fluoro
  misc_feature (8)..(9): 2'-deoxy
  misc_feature (10)..(11): 2'-deoxy-2'-Fluoro
  misc_feature (12)..(12): 2'-deoxy
  misc_feature (13)..(13): 2'-deoxy-2'-Fluoro
  misc_feature (14)..(14): 2'-deoxy
  misc_feature (15)..(17): 2'-deoxy-2'-Fluoro
  misc_feature (18)..(18): 2'-deoxy
  misc_feature (19)..(19): 2'-deoxy-2'-Fluoro
  misc_feature (21)..(21): 3'-3 attached terminal deoxyabasic moeity
cuucucugacuacauccgctt

SEQ ID NO: 2249 - DNA, 21 bp, Artificial Sequence
  Synthetic
  misc_feature (1)..(1): 5'-3 attached terminal deoxyabasic moeity
  misc_feature (1)..(6): 2'-deoxy-2'-Fluoro
  misc_feature (7)..(8): 2'-deoxy
  misc_feature (9)..(10): 2'-deoxy-2'-Fluoro
  misc_feature (11)..(11): 2'-deoxy
  misc_feature (12)..(12): 2'-deoxy-2'-Fluoro
  misc_feature (13)..(13): 2'-deoxy
  misc_feature (14)..(16): 2'-deoxy-2'-Fluoro
  misc_feature (17)..(17): 2'-deoxy
  misc_feature (18)..(18): 2'-deoxy-2'-Fluoro
  misc_feature (19)..(19): 2'-deoxy
  misc_feature (21)..(21): 3'-3 attached terminal deoxyabasic moeity
uucucugacuacauccgcatt

SEQ ID NO: 2250 - DNA, 21 bp, Artificial Sequence
  Synthetic
  misc_feature (1)..(1): 5'-3 attached terminal deoxyabasic moeity
  misc_feature (1)..(3): 2'-deoxy-2'-Fluoro
  misc_feature (4)..(8): 2'-deoxy
  misc_feature (9)..(12): 2'-deoxy-2'-Fluoro
  misc_feature (13)..(13): 2'-deoxy
  misc_feature (14)..(14): 2'-deoxy-2'-Fluoro
  misc_feature (15)..(15): 2'-deoxy
  misc_feature (16)..(16): 2'-deoxy-2'-Fluoro
  misc_feature (17)..(17): 2'-deoxy
  misc_feature (18)..(18): 2'-deoxy-2'-Fluoro
  misc_feature (19)..(19): 2'-deoxy
  misc_feature (21)..(21): 3'-3 attached terminal deoxyabasic moeity
ucugaaaaccucacaugcatt

SEQ ID NO: 2251 - DNA, 21 bp, Artificial Sequence
  Synthetic
  misc_feature (1)..(1): 5'-3 attached terminal deoxyabasic moeity
  misc_feature (1)..(2): 2'-deoxy-2'-Fluoro
  misc_feature (3)..(5): 2'-deoxy
  misc_feature (6)..(6): 2'-deoxy-2'-Fluoro
  misc_feature (7)..(8): 2'-deoxy
  misc_feature (9)..(12): 2'-deoxy-2'-Fluoro
  misc_feature (13)..(13): 2'-deoxy
  misc_feature (14)..(14): 2'-deoxy-2'-Fluoro
  misc_feature (15)..(15): 2'-deoxy
  misc_feature (16)..(19): 2'-deoxy-2'-Fluoro
  misc_feature (21)..(21): 3'-3 attached terminal deoxyabasic moeity
ccagacaaccucacacucctt

SEQ ID NO: 2252 - DNA, 21 bp, Artificial Sequence
  Synthetic
  misc_feature (1)..(1): 5'-3 attached terminal deoxyabasic moeity
  misc_feature (1)..(3): 2'-deoxy
  misc_feature (4)..(4): 2'-deoxy-2'-Fluoro
  misc_feature (5)..(6): 2'-deoxy
  misc_feature (7)..(10): 2'-deoxy-2'-Fluoro
  misc_feature (11)..(11): 2'-deoxy
  misc_feature (12)..(12): 2'-deoxy-2'-Fluoro
  misc_feature (13)..(13): 2'-deoxy
  misc_feature (14)..(17): 2'-deoxy-2'-Fluoro
  misc_feature (18)..(18): 2'-deoxy
  misc_feature (19)..(19): 2'-deoxy-2'-Fluoro
  misc_feature (21)..(21): 3'-3 attached terminal deoxyabasic moeity
agacaaccucacacuccactt

SEQ ID NO: 2253 - DNA, 21 bp, Artificial Sequence
  Synthetic
  misc_feature (1)..(1): 5'-3 attached terminal deoxyabasic moeity
  misc_feature (1)..(2): 2'-deoxy
  misc_feature (3)..(3): 2'-deoxy-2'-Fluoro
  misc_feature (4)..(5): 2'-deoxy
  misc_feature (6)..(9): 2'-deoxy-2'-Fluoro
  misc_feature (10)..(10): 2'-deoxy
  misc_feature (11)..(11): 2'-deoxy-2'-Fluoro
  misc_feature (12)..(12): 2'-deoxy
  misc_feature (13)..(16): 2'-deoxy-2'-Fluoro
  misc_feature (17)..(17): 2'-deoxy
  misc_feature (18)..(18): 2'-deoxy-2'-Fluoro
  misc_feature (19)..(19): 2'-deoxy
  misc_feature (21)..(21): 3'-3 attached terminal deoxyabasic moeity
gacaaccucacacuccacatt

SEQ ID NO: 2254 - DNA, 21 bp, Artificial Sequence
  Synthetic
  misc_feature (1)..(1): 5'-3 attached terminal deoxyabasic moeity
  misc_feature (1)..(2): 2'-deoxy
  misc_feature (3)..(6): 2'-deoxy-2'-Fluoro
  misc_feature (7)..(7): 2'-deoxy
  misc_feature (8)..(8): 2'-deoxy-2'-Fluoro
  misc_feature (9)..(9): 2'-deoxy
  misc_feature (10)..(13): 2'-deoxy-2'-Fluoro
  misc_feature (14)..(14): 2'-deoxy
  misc_feature (15)..(15): 2'-deoxy-2'-Fluoro
  misc_feature (16)..(16): 2'-deoxy
  misc_feature (17)..(18): 2'-deoxy-2'-Fluoro
  misc_feature (19)..(19): 2'-deoxy
  misc_feature (21)..(21): 3'-3 attached terminal deoxyabasic moeity
aaccucacacuccacaccatt

SEQ ID NO: 2255 - DNA, 21 bp, Artificial Sequence
  Synthetic
  misc_feature (1)..(1): 5'-3 attached terminal deoxyabasic moeity
  misc_feature (1)..(1): 2'-deoxy
  misc_feature (2)..(5): 2'-deoxy-2'-Fluoro
  misc_feature (6)..(6): 2'-deoxy
  misc_feature (7)..(7): 2'-deoxy-2'-Fluoro
  misc_feature (8)..(8): 2'-deoxy
  misc_feature (9)..(12): 2'-deoxy-2'-Fluoro
  misc_feature (13)..(13): 2'-deoxy
  misc_feature (14)..(14): 2'-deoxy-2'-Fluoro
  misc_feature (15)..(15): 2'-deoxy
  misc_feature (16)..(17): 2'-deoxy-2'-Fluoro
  misc_feature (18)..(19): 2'-deoxy
  misc_feature (21)..(21): 3'-3 attached terminal deoxyabasic moeity
accucacacuccacaccaatt

SEQ ID NO: 2256 - DNA, 21 bp, Artificial Sequence
  Synthetic
  misc_feature (1)..(1): 5'-3 attached terminal deoxyabasic moeity
  misc_feature (1)..(4): 2'-deoxy-2'-Fluoro
  misc_feature (5)..(5): 2'-deoxy
  misc_feature (6)..(6): 2'-deoxy-2'-Fluoro
  misc_feature (7)..(7): 2'-deoxy
  misc_feature (8)..(11): 2'-deoxy-2'-Fluoro
  misc_feature (12)..(12): 2'-deoxy
  misc_feature (13)..(13): 2'-deoxy-2'-Fluoro
  misc_feature (14)..(14): 2'-deoxy
  misc_feature (15)..(16): 2'-deoxy-2'-Fluoro
  misc_feature (17)..(18): 2'-deoxy
  misc_feature (19)..(19): 2'-deoxy-2'-Fluoro
  misc_feature (21)..(21): 3'-3 attached terminal deoxyabasic moeity
ccucacacuccacaccaautt

SEQ ID NO: 2257 - DNA, 21 bp, Artificial Sequence
  Synthetic
  misc_feature (1)..(1): 5'-3 attached terminal deoxyabasic moeity
  misc_feature (1)..(3): 2'-deoxy-2'-Fluoro
  misc_feature (4)..(4): 2'-deoxy
  misc_feature (5)..(5): 2'-deoxy-2'-Fluoro
  misc_feature (6)..(6): 2'-deoxy
  misc_feature (7)..(10): 2'-deoxy-2'-Fluoro
  misc_feature (11)..(11): 2'-deoxy
  misc_feature (12)..(12): 2'-deoxy-2'-Fluoro
  misc_feature (13)..(13): 2'-deoxy
  misc_feature (14)..(15): 2'-deoxy-2'-Fluoro
  misc_feature (16)..(17): 2'-deoxy
  misc_feature (18)..(18): 2'-deoxy-2'-Fluoro
  misc_feature (19)..(19): 2'-deoxy
  misc_feature (21)..(21): 3'-3 attached terminal deoxyabasic moeity
cucacacuccacaccaaugtt

SEQ ID NO: 2258 - DNA, 21 bp, Artificial Sequence
  Synthetic
  misc_feature (1)..(1): 5'-3 attached terminal deoxyabasic moeity
  misc_feature (1)..(2): 2'-deoxy-2'-Fluoro
  misc_feature (3)..(3): 2'-deoxy
  misc_feature (4)..(4): 2'-deoxy-2'-Fluoro
  misc_feature (5)..(5): 2'-deoxy
  misc_feature (6)..(9): 2'-deoxy-2'-Fluoro
  misc_feature (10)..(10): 2'-deoxy
  misc_feature (11)..(11): 2'-deoxy-2'-Fluoro
  misc_feature (12)..(12): 2'-deoxy
  misc_feature (13)..(14): 2'-deoxy-2'-Fluoro
  misc_feature (15)..(16): 2'-deoxy
  misc_feature (17)..(17): 2'-deoxy-2'-Fluoro
  misc_feature (18)..(18): 2'-deoxy
  misc_feature (19)..(19): 2'-deoxy-2'-Fluoro
  misc_feature (21)..(21): 3'-3 attached terminal deoxyabasic moeity
ucacacuccacaccaaugutt

SEQ ID NO: 2259 - DNA, 21 bp, Artificial Sequence
  Synthetic
  misc_feature (1)..(1): 5'-3 attached terminal deoxyabasic moeity
  misc_feature (1)..(1): 2'-deoxy
  misc_feature (2)..(3): 2'-deoxy-2'-Fluoro
  misc_feature (4)..(5): 2'-deoxy
  misc_feature (6)..(6): 2'-deoxy-2'-Fluoro
  misc_feature (7)..(7): 2'-deoxy
  misc_feature (8)..(12): 2'-deoxy-2'-Fluoro
  misc_feature (13)..(19): 2'-deoxy
  misc_feature (21)..(21): 3'-3 attached terminal deoxyabasic moeity
gucaacaucuccagagaggtt

SEQ ID NO: 2260 - DNA, 21 bp, Artificial Sequence
  Synthetic
  misc_feature (1)..(1): 5'-3 attached terminal deoxyabasic moeity
  misc_feature (1)..(2): 2'-deoxy-2'-Fluoro
  misc_feature (3)..(4): 2'-deoxy
  misc_feature (5)..(5): 2'-deoxy-2'-Fluoro
  misc_feature (6)..(6): 2'-deoxy
  misc_feature (7)..(11): 2'-deoxy-2'-Fluoro
  misc_feature (12)..(19): 2'-deoxy
  misc_feature (21)..(21): 3'-3 attached terminal deoxyabasic moeity
ucaacaucuccagagaggatt

SEQ ID NO: 2261 - DNA, 21 bp, Artificial Sequence
  Synthetic
  misc_feature (1)..(1): 5'-3 attached terminal deoxyabasic moeity
  misc_feature (1)..(1): 2'-deoxy
  misc_feature (2)..(2): 2'-deoxy-2'-Fluoro
  misc_feature (3)..(3): 2'-deoxy
  misc_feature (4)..(8): 2'-deoxy-2'-Fluoro
  misc_feature (9)..(16): 2'-deoxy
  misc_feature (17)..(17): 2'-deoxy-2'-Fluoro
  misc_feature (18)..(19): 2'-deoxy
  misc_feature (21)..(21): 3'-3 attached terminal deoxyabasic moeity
acaucuccagagaggacaatt

SEQ ID NO: 2262 - DNA, 21 bp, Artificial Sequence
  Synthetic
  misc_feature (1)..(1): 5'-3 attached terminal deoxyabasic moeity
  misc_feature (1)..(1): 2'-deoxy-2'-Fluoro
  misc_feature (2)..(2): 2'-deoxy
  misc_feature (3)..(7): 2'-deoxy-2'-Fluoro
  misc_feature (8)..(15): 2'-deoxy
  misc_feature (16)..(16): 2'-deoxy-2'-Fluoro
  misc_feature (17)..(18): 2'-deoxy
  misc_feature (19)..(19): 2'-deoxy-2'-Fluoro
  misc_feature (21)..(21): 3'-3 attached terminal deoxyabasic moeity
caucuccagagaggacaactt

SEQ ID NO: 2263 - DNA, 21 bp, Artificial Sequence
  Synthetic
  misc_feature (1)..(1): 5'-3 attached terminal deoxyabasic moeity
  misc_feature (1)..(1): 2'-deoxy-2'-Fluoro
  misc_feature (2)..(5): 2'-deoxy
  misc_feature (6)..(9): 2'-deoxy-2'-Fluoro
  misc_feature (10)..(11): 2'-deoxy
  misc_feature (12)..(12): 2'-deoxy-2'-Fluoro
  misc_feature (13)..(13): 2'-deoxy
  misc_feature (14)..(15): 2'-deoxy-2'-Fluoro
  misc_feature (16)..(16): 2'-deoxy
  misc_feature (17)..(17): 2'-deoxy-2'-Fluoro
  misc_feature (18)..(18): 2'-deoxy
  misc_feature (19)..(19): 2'-deoxy-2'-Fluoro
  misc_feature (21)..(21): 3'-3 attached terminal deoxyabasic moeity
uggagucccagcaucacgutt

SEQ ID NO: 2264 - DNA, 21 bp, Artificial Sequence
  Synthetic
  misc_feature (1)..(1): 5'-3 attached terminal deoxyabasic moeity
  misc_feature (1)..(1): 2'-deoxy-2'-Fluoro
  misc_feature (2)..(2): 2'-deoxy
  misc_feature (3)..(4): 2'-deoxy-2'-Fluoro
  misc_feature (5)..(5): 2'-deoxy
  misc_feature (6)..(6): 2'-deoxy-2'-Fluoro
  misc_feature (7)..(7): 2'-deoxy
  misc_feature (8)..(8): 2'-deoxy-2'-Fluoro
  misc_feature (9)..(10): 2'-deoxy
  misc_feature (11)..(11): 2'-deoxy-2'-Fluoro
  misc_feature (12)..(12): 2'-deoxy
  misc_feature (13)..(13): 2'-deoxy-2'-Fluoro
  misc_feature (14)..(15): 2'-deoxy
  misc_feature (16)..(18): 2'-deoxy-2'-Fluoro
  misc_feature (19)..(19): 2'-deoxy
  misc_feature (21)..(21): 3'-3 attached terminal deoxyabasic moeity
caucacgugguacaacccatt

SEQ ID NO: 2265 - DNA, 21 bp, Artificial Sequence
  Synthetic
  misc_feature (1)..(1): 5'-3 attached terminal deoxyabasic moeity
  misc_feature (1)..(2): 2'-deoxy
  misc_feature (3)..(3): 2'-deoxy-2'-Fluoro
  misc_feature (4)..(4): 2'-deoxy
  misc_feature (5)..(5): 2'-deoxy-2'-Fluoro
  misc_feature (6)..(7): 2'-deoxy
  misc_feature (8)..(8): 2'-deoxy-2'-Fluoro
  misc_feature (9)..(12): 2'-deoxy
  misc_feature (13)..(14): 2'-deoxy-2'-Fluoro
  misc_feature (15)..(17): 2'-deoxy
  misc_feature (18)..(19): 2'-deoxy-2'-Fluoro
  misc_feature (21)..(21): 3'-3 attached terminal deoxyabasic moeity
gauauggugggaccagauutt

SEQ ID NO: 2266 - DNA, 21 bp, Artificial Sequence
  Synthetic
  misc_feature (1)..(1): 5'-3 attached terminal deoxyabasic moeity
  misc_feature (1)..(4): 2'-deoxy-2'-Fluoro
  misc_feature (5)..(6): 2'-deoxy
  misc_feature (7)..(8): 2'-deoxy-2'-Fluoro
  misc_feature (9)..(14): 2'-deoxy
  misc_feature (15)..(15): 2'-deoxy-2'-Fluoro
  misc_feature (16)..(16): 2'-deoxy
  misc_feature (17)..(19): 2'-deoxy-2'-Fluoro
  misc_feature (21)..(21): 3'-3 attached terminal deoxyabasic moeity
cucuggccagagaacguuctt

SEQ ID NO: 2267 - DNA, 21 bp, Artificial Sequence
  Synthetic
  misc_feature (1)..(1): 5'-3 attached terminal deoxyabasic moeity
  misc_feature (1)..(3): 2'-deoxy-2'-Fluoro
  misc_feature (4)..(5): 2'-deoxy
  misc_feature (6)..(7): 2'-deoxy-2'-Fluoro
  misc_feature (8)..(13): 2'-deoxy
  misc_feature (14)..(14): 2'-deoxy-2'-Fluoro
  misc_feature (15)..(15): 2'-deoxy
  misc_feature (16)..(18): 2'-deoxy-2'-Fluoro
  misc_feature (19)..(19): 2'-deoxy
  misc_feature (21)..(21): 3'-3 attached terminal deoxyabasic moeity
ucuggccagagaacguucatt

SEQ ID NO: 2268 - DNA, 21 bp, Artificial Sequence
  Synthetic
  misc_feature (1)..(1): 5'-3 attached terminal deoxyabasic moeity
  misc_feature (1)..(2): 2'-deoxy
  misc_feature (3)..(3): 2'-deoxy-2'-Fluoro
  misc_feature (4)..(4): 2'-deoxy
  misc_feature (5)..(5): 2'-deoxy-2'-Fluoro
  misc_feature (6)..(9): 2'-deoxy
  misc_feature (10)..(10): 2'-deoxy-2'-Fluoro
  misc_feature (11)..(11): 2'-deoxy
  misc_feature (12)..(12): 2'-deoxy-2'-Fluoro
  misc_feature (13)..(19): 2'-deoxy
  misc_feature (21)..(21): 3'-3 attached terminal deoxyabasic moeity
aguacagaauguggaggagtt

SEQ ID NO: 2269 - DNA, 21 bp, Artificial Sequence
  Synthetic
  misc_feature (1)..(1): 5'-3 attached terminal deoxyabasic moeity
  misc_feature (1)..(4): 2'-deoxy
  misc_feature (5)..(5): 2'-deoxy-2'-Fluoro
  misc_feature (6)..(6): 2'-deoxy
  misc_feature (7)..(7): 2'-deoxy-2'-Fluoro
  misc_feature (8)..(19): 2'-deoxy
  misc_feature (21)..(21): 3'-3 attached terminal deoxyabasic moeity
agaauguggaggaggaagatt

SEQ ID NO: 2270 - DNA, 21 bp, Artificial Sequence
  Synthetic
  misc_feature (1)..(1): 5'-3 attached terminal deoxyabasic moeity
  misc_feature (1)..(1): 2'-deoxy-2'-Fluoro
  misc_feature (2)..(4): 2'-deoxy
  misc_feature (5)..(5): 2'-deoxy-2'-Fluoro
  misc_feature (6)..(6): 2'-deoxy
  misc_feature (7)..(7): 2'-deoxy-2'-Fluoro
  misc_feature (8)..(8): 2'-deoxy
  misc_feature (9)..(10): 2'-deoxy-2'-Fluoro
  misc_feature (11)..(11): 2'-deoxy
  misc_feature (12)..(14): 2'-deoxy-2'-Fluoro
  misc_feature (15)..(19): 2'-deoxy
  misc_feature (21)..(21): 3'-3 attached terminal deoxyabasic moeity
ugagcaugucaccugagaatt

SEQ ID NO: 2271 - DNA, 21 bp, Artificial Sequence
  Synthetic
  misc_feature (1)..(1): 5'-3 attached terminal deoxyabasic moeity
  misc_feature (1)..(1): 2'-deoxy-2'-Fluoro
  misc_feature (2)..(6): 2'-deoxy
  misc_feature (7)..(8): 2'-deoxy-2'-Fluoro
  misc_feature (9)..(13): 2'-deoxy
  misc_feature (14)..(14): 2'-deoxy-2'-Fluoro
  misc_feature (15)..(19): 2'-deoxy
  misc_feature (21)..(21): 3'-3 attached terminal deoxyabasic moeity
ugggggcugagaauggaggtt

SEQ ID NO: 2272 - DNA, 21 bp, Artificial Sequence
  Synthetic
  misc_feature (1)..(1): 5'-3 attached terminal deoxyabasic moeity
  misc_feature (1)..(1): 2'-deoxy
  misc_feature (2)..(5): 2'-deoxy-2'-Fluoro
  misc_feature (6)..(6): 2'-deoxy
  misc_feature (7)..(9): 2'-deoxy-2'-Fluoro
  misc_feature (10)..(10): 2'-deoxy
  misc_feature (11)..(12): 2'-deoxy-2'-Fluoro
  misc_feature (13)..(16): 2'-deoxy
  misc_feature (17)..(19): 2'-deoxy-2'-Fluoro
  misc_feature (21)..(21): 3'-3 attached terminal deoxyabasic moeity
auccugccuaccggaguuutt

SEQ ID NO: 2273 - DNA, 21 bp, Artificial Sequence
  Synthetic
  misc_feature (1)..(1): 5'-3 attached terminal deoxyabasic moeity
  misc_feature (1)..(4): 2'-deoxy-2'-Fluoro
  misc_feature (5)..(5): 2'-deoxy
  misc_feature (6)..(8): 2'-deoxy-2'-Fluoro
  misc_feature (9)..(9): 2'-deoxy
  misc_feature (10)..(11): 2'-deoxy-2'-Fluoro
  misc_feature (12)..(15): 2'-deoxy
  misc_feature (16)..(19): 2'-deoxy-2'-Fluoro
  misc_feature (21)..(21): 3'-3 attached terminal deoxyabasic moeity
uccugccuaccggaguuuutt

SEQ ID NO: 2274 - DNA, 21 bp, Artificial Sequence
  Synthetic
  misc_feature (1)..(1): 5'-3 attached terminal deoxyabasic moeity
  misc_feature (1)..(3): 2'-deoxy-2'-Fluoro
  misc_feature (4)..(4): 2'-deoxy
  misc_feature (5)..(7): 2'-deoxy-2'-Fluoro
  misc_feature (8)..(8): 2'-deoxy
  misc_feature (9)..(10): 2'-deoxy-2'-Fluoro
  misc_feature (11)..(14): 2'-deoxy
  misc_feature (15)..(18): 2'-deoxy-2'-Fluoro
  misc_feature (19)..(19): 2'-deoxy
  misc_feature (21)..(21): 3'-3 attached terminal deoxyabasic moeity
ccugccuaccggaguuuuatt

SEQ ID NO: 2275 - DNA, 21 bp, Artificial Sequence
  Synthetic
  misc_feature (1)..(1): 5'-3 attached terminal deoxyabasic moeity
  misc_feature (1)..(2): 2'-deoxy-2'-Fluoro
  misc_feature (3)..(3): 2'-deoxy
  misc_feature (4)..(6): 2'-deoxy-2'-Fluoro
  misc_feature (7)..(7): 2'-deoxy
  misc_feature (8)..(9): 2'-deoxy-2'-Fluoro
  misc_feature (10)..(13): 2'-deoxy
  misc_feature (14)..(17): 2'-deoxy-2'-Fluoro
  misc_feature (18)..(19): 2'-deoxy
  misc_feature (21)..(21): 3'-3 attached terminal deoxyabasic moeity
cugccuaccggaguuuuagtt

SEQ ID NO: 2276 - DNA, 21 bp, Artificial Sequence
  Synthetic
  misc_feature (1)..(1): 5'-3 attached terminal deoxyabasic moeity
  misc_feature (1)..(1): 2'-deoxy-2'-Fluoro
  misc_feature (2)..(2): 2'-deoxy
  misc_feature (3)..(5): 2'-deoxy-2'-Fluoro
  misc_feature (6)..(6): 2'-deoxy
  misc_feature (7)..(8): 2'-deoxy-2'-Fluoro
  misc_feature (9)..(12): 2'-deoxy
  misc_feature (13)..(16): 2'-deoxy-2'-Fluoro
  misc_feature (17)..(18): 2'-deoxy
  misc_feature (19)..(19): 2'-deoxy-2'-Fluoro
  misc_feature (21)..(21): 3'-3 attached terminal deoxyabasic moeity
ugccuaccggaguuuuagutt

SEQ ID NO: 2277 - DNA, 21 bp, Artificial Sequence
  Synthetic
  misc_feature (1)..(1): 5'-3 attached terminal deoxyabasic moeity
  misc_feature (1)..(3): 2'-deoxy
  misc_feature (4)..(4): 2'-deoxy-2'-Fluoro
  misc_feature (5)..(7): 2'-deoxy
  misc_feature (8)..(13): 2'-deoxy-2'-Fluoro
  misc_feature (14)..(14): 2'-deoxy
  misc_feature (15)..(15): 2'-deoxy-2'-Fluoro
  misc_feature (16)..(16): 2'-deoxy
  misc_feature (17)..(17): 2'-deoxy-2'-Fluoro
  misc_feature (18)..(19): 2'-deoxy
  misc_feature (21)..(21): 3'-3 attached terminal deoxyabasic moeity
gagcagauccuucacaugatt

SEQ ID NO: 2278 - DNA, 21 bp, Artificial Sequence
  Synthetic
  misc_feature (1)..(1): 5'-3 attached terminal deoxyabasic moeity
  misc_feature (1)..(4): 2'-deoxy-2'-Fluoro
  misc_feature (5)..(5): 2'-deoxy
  misc_feature (6)..(6): 2'-deoxy-2'-Fluoro
  misc_feature (7)..(7): 2'-deoxy
  misc_feature (8)..(8): 2'-deoxy-2'-Fluoro
  misc_feature (9)..(11): 2'-deoxy
  misc_feature (12)..(12): 2'-deoxy-2'-Fluoro
  misc_feature (13)..(13): 2'-deoxy
  misc_feature (14)..(17): 2'-deoxy-2'-Fluoro
  misc_feature (18)..(18): 2'-deoxy
  misc_feature (19)..(19): 2'-deoxy-2'-Fluoro
  misc_feature (21)..(21): 3'-3 attached terminal deoxyabasic moeity
cuucacaugaguguccugctt

SEQ ID NO: 2279 - DNA, 21 bp, Artificial Sequence
  Synthetic
  misc_feature (1)..(1): 5'-3 attached terminal deoxyabasic moeity
  misc_feature (1)..(3): 2'-deoxy
  misc_feature (4)..(6): 2'-deoxy-2'-Fluoro
  misc_feature (7)..(7): 2'-deoxy
  misc_feature (8)..(8): 2'-deoxy-2'-Fluoro
  misc_feature (9)..(9): 2'-deoxy
  misc_feature (10)..(10): 2'-deoxy-2'-Fluoro
  misc_feature (11)..(13): 2'-deoxy
  misc_feature (14)..(14): 2'-deoxy-2'-Fluoro
  misc_feature (15)..(16): 2'-deoxy
  misc_feature (17)..(17): 2'-deoxy-2'-Fluoro
  misc_feature (18)..(19): 2'-deoxy
  misc_feature (21)..(21): 3'-3 attached terminal deoxyabasic moeity
gaguuugugcaggcagugatt

SEQ ID NO: 2280 - DNA, 21 bp, Artificial Sequence
  Synthetic
  misc_feature (1)..(1): 5'-3 attached terminal deoxyabasic moeity
  misc_feature (1)..(2): 2'-deoxy-2'-Fluoro
  misc_feature (3)..(3): 2'-deoxy
  misc_feature (4)..(4): 2'-deoxy-2'-Fluoro
  misc_feature (5)..(5): 2'-deoxy
  misc_feature (6)..(6): 2'-deoxy-2'-Fluoro
  misc_feature (7)..(7): 2'-deoxy
  misc_feature (8)..(10): 2'-deoxy-2'-Fluoro
  misc_feature (11)..(11): 2'-deoxy
  misc_feature (12)..(17): 2'-deoxy-2'-Fluoro
  misc_feature (18)..(18): 2'-deoxy
  misc_feature (19)..(19): 2'-deoxy-2'-Fluoro
  misc_feature (21)..(21): 3'-3 attached terminal deoxyabasic moeity
uuguguacucgucccucactt

SEQ ID NO: 2281 - DNA, 21 bp, Artificial Sequence
  Synthetic
  misc_feature (1)..(1): 5'-3 attached terminal deoxyabasic moeity
  misc_feature (1)..(3): 2'-deoxy
  misc_feature (4)..(6): 2'-deoxy-2'-Fluoro
  misc_feature (7)..(7): 2'-deoxy
  misc_feature (8)..(11): 2'-deoxy-2'-Fluoro
  misc_feature (12)..(12): 2'-deoxy
  misc_feature (13)..(19): 2'-deoxy-2'-Fluoro
  misc_feature (21)..(21): 3'-3 attached terminal deoxyabasic moeity
ggacucauuuugcuuucuctt

SEQ ID NO: 2282 - DNA, 21 bp, Artificial Sequence
  Synthetic
  misc_feature (1)..(1): 5'-3 attached terminal deoxyabasic moeity
  misc_feature (1)..(3): 2'-deoxy-2'-Fluoro
  misc_feature (4)..(4): 2'-deoxy
  misc_feature (5)..(6): 2'-deoxy-2'-Fluoro
  misc_feature (7)..(7): 2'-deoxy
  misc_feature (8)..(11): 2'-deoxy-2'-Fluoro
  misc_feature (12)..(12): 2'-deoxy
  misc_feature (13)..(15): 2'-deoxy-2'-Fluoro
  misc_feature (16)..(16): 2'-deoxy
  misc_feature (17)..(19): 2'-deoxy-2'-Fluoro
  misc_feature (21)..(21): 3'-3 attached terminal deoxyabasic moeity
cuuguugcccuaccugcuctt

SEQ ID NO: 2283 - DNA, 21 bp, Artificial Sequence
  Synthetic
  misc_feature (1)..(1): 5'-3 attached terminal deoxyabasic moeity
  misc_feature (1)..(3): 2'-deoxy-2'-Fluoro
  misc_feature (4)..(5): 2'-deoxy
  misc_feature (6)..(7): 2'-deoxy-2'-Fluoro
  misc_feature (8)..(12): 2'-deoxy
  misc_feature (13)..(14): 2'-deoxy-2'-Fluoro
  misc_feature (15)..(16): 2'-deoxy
  misc_feature (17)..(19): 2'-deoxy-2'-Fluoro
  misc_feature (21)..(21): 3'-3 attached terminal deoxyabasic moeity
uccagcuggaagcuggucctt

SEQ ID NO: 2284 - DNA, 21 bp, Artificial Sequence
  Synthetic
  misc_feature (1)..(1): 5'-3 attached terminal deoxyabasic moeity
  misc_feature (1)..(1): 2'-deoxy
  misc_feature (2)..(4): 2'-deoxy-2'-Fluoro
  misc_feature (5)..(6): 2'-deoxy
  misc_feature (7)..(8): 2'-deoxy-2'-Fluoro
  misc_feature (9)..(9): 2'-deoxy
  misc_feature (10)..(12): 2'-deoxy-2'-Fluoro
  misc_feature (13)..(16): 2'-deoxy
  misc_feature (17)..(18): 2'-deoxy-2'-Fluoro
  misc_feature (19)..(19): 2'-deoxy
  misc_feature (21)..(21): 3'-3 attached terminal deoxyabasic moeity
acuugauugcccaaagucatt

SEQ ID NO: 2285 - DNA, 21 bp, Artificial Sequence
  Synthetic
  misc_feature (1)..(1): 5'-3 attached terminal deoxyabasic moeity
  misc_feature (1)..(3): 2'-deoxy-2'-Fluoro
  misc_feature (4)..(5): 2'-deoxy
  misc_feature (6)..(7): 2'-deoxy-2'-Fluoro
  misc_feature (8)..(8): 2'-deoxy
  misc_feature (9)..(11): 2'-deoxy-2'-Fluoro
  misc_feature (12)..(15): 2'-deoxy
  misc_feature (16)..(17): 2'-deoxy-2'-Fluoro
  misc_feature (18)..(18): 2'-deoxy
  misc_feature (19)..(19): 2'-deoxy-2'-Fluoro
  misc_feature (21)..(21): 3'-3 attached terminal deoxyabasic moeity
cuugauugcccaaagucactt

SEQ ID NO: 2286 - DNA, 21 bp, Artificial Sequence
  Synthetic
  misc_feature (1)..(1): 5'-3 attached terminal deoxyabasic moeity
  misc_feature (1)..(2): 2'-deoxy-2'-Fluoro
  misc_feature (3)..(3): 2'-deoxy
  misc_feature (4)..(4): 2'-deoxy-2'-Fluoro
  misc_feature (5)..(5): 2'-deoxy
  misc_feature (6)..(6): 2'-deoxy-2'-Fluoro
  misc_feature (7)..(7): 2'-deoxy
  misc_feature (8)..(8): 2'-deoxy-2'-Fluoro
  misc_feature (9)..(10): 2'-deoxy
  misc_feature (11)..(12): 2'-deoxy-2'-Fluoro
  misc_feature (13)..(17): 2'-deoxy
  misc_feature (18)..(19): 2'-deoxy-2'-Fluoro
  misc_feature (21)..(21): 3'-3 attached terminal deoxyabasic moeity
ccacauguggccagaagcctt

SEQ ID NO: 2287 - DNA, 21 bp, Artificial Sequence
  Synthetic
  misc_feature (1)..(1): 5'-3 attached terminal deoxyabasic moeity
  misc_feature (1)..(1): 2'-deoxy-2'-Fluoro
  misc_feature (2)..(5): 2'-deoxy
  misc_feature (6)..(9): 2'-deoxy-2'-Fluoro
  misc_feature (10)..(11): 2'-deoxy
  misc_feature (12)..(12): 2'-deoxy-2'-Fluoro
  misc_feature (13)..(15): 2'-deoxy
  misc_feature (16)..(16): 2'-deoxy-2'-Fluoro
  misc_feature (17)..(19): 2'-deoxy
  misc_feature (21)..(21): 3'-3 attached terminal deoxyabasic moeity
ugggaucccaguaaacaaatt

SEQ ID NO: 2288 - DNA, 21 bp, Artificial Sequence
  Synthetic
  misc_feature (1)..(1): 5'-3 attached terminal deoxyabasic moeity
  misc_feature (1)..(1): 2'-deoxy-2'-Fluoro
  misc_feature (2)..(4): 2'-deoxy
  misc_feature (5)..(6): 2'-deoxy-2'-Fluoro
  misc_feature (7)..(7): 2'-deoxy
  misc_feature (8)..(8): 2'-deoxy-2'-Fluoro
  misc_feature (9)..(10): 2'-deoxy
  misc_feature (11)..(13): 2'-deoxy-2'-Fluoro
  misc_feature (14)..(15): 2'-deoxy
  misc_feature (16)..(17): 2'-deoxy-2'-Fluoro
  misc_feature (18)..(18): 2'-deoxy
  misc_feature (19)..(19): 2'-deoxy-2'-Fluoro
  misc_feature (21)..(21): 3'-3 attached terminal deoxyabasic moeity
cagacugcagucugacugctt

SEQ ID NO: 2289 - DNA, 21 bp, Artificial Sequence
  Synthetic
  misc_feature (1)..(1): 5'-3 attached terminal deoxyabasic moeity
  misc_feature (1)..(3): 2'-deoxy
  misc_feature (4)..(5): 2'-deoxy-2'-Fluoro
  misc_feature (6)..(6): 2'-deoxy
  misc_feature (7)..(7): 2'-deoxy-2'-Fluoro
  misc_feature (8)..(9): 2'-deoxy
  misc_feature (10)..(12): 2'-deoxy-2'-Fluoro
  misc_feature (13)..(14): 2'-deoxy
  misc_feature (15)..(16): 2'-deoxy-2'-Fluoro
  misc_feature (17)..(17): 2'-deoxy
  misc_feature (18)..(18): 2'-deoxy-2'-Fluoro
  misc_feature (19)..(19): 2'-deoxy
  misc_feature (21)..(21): 3'-3 attached terminal deoxyabasic moeity
agacugcagucugacugcatt

SEQ ID NO: 2290 - DNA, 21 bp, Artificial Sequence
  Synthetic
  misc_feature (1)..(1): 5'-3 attached terminal deoxyabasic moeity
  misc_feature (1)..(2): 2'-deoxy
  misc_feature (3)..(4): 2'-deoxy-2'-Fluoro
  misc_feature (5)..(5): 2'-deoxy
  misc_feature (6)..(6): 2'-deoxy-2'-Fluoro
  misc_feature (7)..(8): 2'-deoxy
  misc_feature (9)..(11): 2'-deoxy-2'-Fluoro
  misc_feature (12)..(13): 2'-deoxy
  misc_feature (14)..(15): 2'-deoxy-2'-Fluoro
  misc_feature (16)..(16): 2'-deoxy
  misc_feature (17)..(17): 2'-deoxy-2'-Fluoro
  misc_feature (18)..(18): 2'-deoxy
  misc_feature (19)..(19): 2'-deoxy-2'-Fluoro
  misc_feature (21)..(21): 3'-3 attached terminal deoxyabasic moeity
gacugcagucugacugcautt

SEQ ID NO: 2291 - DNA, 21 bp, Artificial Sequence
  Synthetic
  misc_feature (1)..(2): 2'-O-methyl
  misc_feature (4)..(4): 2'-deoxy-2'-Fluoro
  misc_feature (5)..(11): 2'-O-methyl
  misc_feature (12)..(12): 2'-deoxy-2'-Fluoro
  misc_feature (13)..(15): 2'-O-methyl
  misc_feature (16)..(16): 2'-deoxy-2'-Fluoro
  misc_feature (17)..(19): 2'-O-methyl
agucagagaagcaggugggtt

SEQ ID NO: 2292 - DNA, 21 bp, Artificial Sequence
  Synthetic
  misc_feature (1)..(1): 2'-O-methyl
  misc_feature (3)..(4): 2'-O-methyl
  misc_feature (5)..(6): 2'-deoxy-2'-Fluoro
  misc_feature (7)..(13): 2'-O-methyl
  misc_feature (14)..(14): 2'-deoxy-2'-Fluoro
  misc_feature (15)..(17): 2'-O-methyl
  misc_feature (18)..(18): 2'-deoxy-2'-Fluoro
  misc_feature (19)..(19): 2'-O-methyl
guagucagagaagcaggugtt

SEQ ID NO: 2293 - DNA, 21 bp, Artificial Sequence
  Synthetic
  misc_feature (1)..(2): 2'-O-methyl
  misc_feature (4)..(4): 2'-O-methyl
  misc_feature (5)..(5): 2'-deoxy-2'-Fluoro
  misc_feature (6)..(7): 2'-O-methyl
  misc_feature (8)..(9): 2'-deoxy-2'-Fluoro
  misc_feature (10)..(16): 2'-O-methyl
  misc_feature (17)..(17): 2'-deoxy-2'-Fluoro
  misc_feature (18)..(19): 2'-O-methyl
gauguagucagagaagcagtt

SEQ ID NO: 2294 - DNA, 21 bp, Artificial Sequence
  Synthetic
  misc_feature (1)..(3): 2'-O-methyl
  misc_feature (4)..(4): 2'-deoxy-2'-Fluoro
  misc_feature (5)..(5): 2'-O-methyl
  misc_feature (6)..(6): 2'-deoxy-2'-Fluoro
  misc_feature (7)..(8): 2'-O-methyl
  misc_feature (9)..(10): 2'-deoxy-2'-Fluoro
  misc_feature (11)..(17): 2'-O-methyl
  misc_feature (18)..(18): 2'-deoxy-2'-Fluoro
  misc_feature (19)..(19): 2'-O-methyl
ggauguagucagagaagcatt

SEQ ID NO: 2295 - DNA, 21 bp, Artificial Sequence
  Synthetic
  misc_feature (2)..(4): 2'-O-methyl
  misc_feature (5)..(5): 2'-deoxy-2'-Fluoro
  misc_feature (6)..(6): 2'-O-methyl
  misc_feature (7)..(7): 2'-deoxy-2'-Fluoro
  misc_feature (8)..(9): 2'-O-methyl
  misc_feature (10)..(11): 2'-deoxy-2'-Fluoro
  misc_feature (12)..(18): 2'-O-methyl
  misc_feature (19)..(19): 2'-deoxy-2'-Fluoro
cggauguagucagagaagctt

SEQ ID NO: 2296 - DNA, 21 bp, Artificial Sequence
  Synthetic
  misc_feature (1)..(1): 2'-O-methyl
  misc_feature (3)..(5): 2'-O-methyl
  misc_feature (6)..(6): 2'-deoxy-2'-Fluoro
  misc_feature (7)..(7): 2'-O-methyl
  misc_feature (8)..(8): 2'-deoxy-2'-Fluoro
  misc_feature (9)..(10): 2'-O-methyl
  misc_feature (11)..(12): 2'-deoxy-2'-Fluoro
  misc_feature (13)..(19): 2'-O-methyl
gcggauguagucagagaagtt

SEQ ID NO: 2297 - DNA, 21 bp, Artificial Sequence
  Synthetic
  misc_feature (2)..(2): 2'-O-methyl
  misc_feature (4)..(6): 2'-O-methyl
  misc_feature (7)..(7): 2'-deoxy-2'-Fluoro
  misc_feature (8)..(8): 2'-O-methyl
  misc_feature (9)..(9): 2'-deoxy-2'-Fluoro
  misc_feature (10)..(11): 2'-O-methyl
  misc_feature (12)..(13): 2'-deoxy-2'-Fluoro
  misc_feature (14)..(19): 2'-O-methyl
ugcggauguagucagagaatt

SEQ ID NO: 2298 - DNA, 21 bp, Artificial Sequence
  Synthetic
  misc_feature (2)..(2): 2'-O-methyl
  misc_feature (4)..(4): 2'-O-methyl
  misc_feature (5)..(5): 2'-deoxy-2'-Fluoro
  misc_feature (6)..(6): 2'-O-methyl
  misc_feature (7)..(7): 2'-deoxy-2'-Fluoro
  misc_feature (8)..(11): 2'-O-methyl
  misc_feature (12)..(16): 2'-deoxy-2'-Fluoro
  misc_feature (17)..(19): 2'-O-methyl
ugcaugugagguuuucagatt

SEQ ID NO: 2299 - DNA, 21 bp, Artificial Sequence
  Synthetic
  misc_feature (1)..(4): 2'-O-methyl
  misc_feature (5)..(5): 2'-deoxy-2'-Fluoro
  misc_feature (6)..(6): 2'-O-methyl
  misc_feature (7)..(7): 2'-deoxy-2'-Fluoro
  misc_feature (8)..(11): 2'-O-methyl
  misc_feature (12)..(13): 2'-deoxy-2'-Fluoro
  misc_feature (14)..(14): 2'-O-methyl
  misc_feature (15)..(17): 2'-deoxy-2'-Fluoro
  misc_feature (18)..(19): 2'-O-methyl
ggagugugagguugucuggtt

SEQ ID NO: 2300 - DNA, 21 bp, Artificial Sequence
  Synthetic
  misc_feature (1)..(1): 2'-O-methyl
  misc_feature (3)..(6): 2'-O-methyl
  misc_feature (7)..(7): 2'-deoxy-2'-Fluoro
  misc_feature (8)..(8): 2'-O-methyl
  misc_feature (9)..(9): 2'-deoxy-2'-Fluoro
  misc_feature (10)..(13): 2'-O-methyl
  misc_feature (14)..(15): 2'-deoxy-2'-Fluoro
  misc_feature (16)..(16): 2'-O-methyl
  misc_feature (17)..(19): 2'-deoxy-2'-Fluoro
guggagugugagguugucutt

SEQ ID NO: 2301 - DNA, 21 bp, Artificial Sequence
  Synthetic
  misc_feature (2)..(2): 2'-O-methyl
  misc_feature (4)..(7): 2'-O-methyl
  misc_feature (8)..(8): 2'-deoxy-2'-Fluoro
  misc_feature (9)..(9): 2'-O-methyl
  misc_feature (10)..(10): 2'-deoxy-2'-Fluoro
  misc_feature (11)..(14): 2'-O-methyl
  misc_feature (15)..(16): 2'-deoxy-2'-Fluoro
  misc_feature (17)..(17): 2'-O-methyl
  misc_feature (18)..(19): 2'-deoxy-2'-Fluoro
uguggagugugagguuguctt

SEQ ID NO: 2302 - DNA, 21 bp, Artificial Sequence
  Synthetic
  misc_feature (2)..(3): 2'-O-methyl
  misc_feature (4)..(4): 2'-deoxy-2'-Fluoro
  misc_feature (5)..(5): 2'-O-methyl
  misc_feature (6)..(6): 2'-deoxy-2'-Fluoro
  misc_feature (7)..(10): 2'-O-methyl
  misc_feature (11)..(11): 2'-deoxy-2'-Fluoro
  misc_feature (12)..(12): 2'-O-methyl
  misc_feature (13)..(13): 2'-deoxy-2'-Fluoro
  misc_feature (14)..(17): 2'-O-methyl
  misc_feature (18)..(19): 2'-deoxy-2'-Fluoro
ugguguggagugugagguutt

SEQ ID NO: 2303 - DNA, 21 bp, Artificial Sequence
  Synthetic
  misc_feature (3)..(4): 2'-O-methyl
  misc_feature (5)..(5): 2'-deoxy-2'-Fluoro
  misc_feature (6)..(6): 2'-O-methyl
  misc_feature (7)..(7): 2'-deoxy-2'-Fluoro
  misc_feature (8)..(11): 2'-O-methyl
  misc_feature (12)..(12): 2'-deoxy-2'-Fluoro
  misc_feature (13)..(13): 2'-O-methyl
  misc_feature (14)..(14): 2'-deoxy-2'-Fluoro
  misc_feature (15)..(18): 2'-O-methyl
  misc_feature (19)..(19): 2'-deoxy-2'-Fluoro
uugguguggagugugaggutt

SEQ ID NO: 2304 - DNA, 21 bp, Artificial Sequence
  Synthetic
  misc_feature (1)..(1): 2'-O-methyl
  misc_feature (4)..(5): 2'-O-methyl
  misc_feature (6)..(6): 2'-deoxy-2'-Fluoro
  misc_feature (7)..(7): 2'-O-methyl
  misc_feature (8)..(8): 2'-deoxy-2'-Fluoro
  misc_feature (9)..(12): 2'-O-methyl
  misc_feature (13)..(13): 2'-deoxy-2'-Fluoro
  misc_feature (14)..(14): 2'-O-methyl
  misc_feature (15)..(15): 2'-deoxy-2'-Fluoro
  misc_feature (16)..(19): 2'-O-methyl
auugguguggagugugaggtt

SEQ ID NO: 2305 - DNA, 21 bp, Artificial Sequence
  Synthetic
  misc_feature (2)..(2): 2'-O-methyl
  misc_feature (4)..(4): 2'-deoxy-2'-Fluoro
  misc_feature (5)..(6): 2'-O-methyl
  misc_feature (7)..(7): 2'-deoxy-2'-Fluoro
  misc_feature (8)..(8): 2'-O-methyl
  misc_feature (9)..(9): 2'-deoxy-2'-Fluoro
  misc_feature (10)..(13): 2'-O-methyl
  misc_feature (14)..(14): 2'-deoxy-2'-Fluoro
  misc_feature (15)..(15): 2'-O-methyl
  misc_feature (16)..(16): 2'-deoxy-2'-Fluoro
  misc_feature (17)..(19): 2'-O-methyl
cauugguguggagugugagtt

SEQ ID NO: 2306 - DNA, 21 bp, Artificial Sequence
  Synthetic
  misc_feature (1)..(1): 2'-O-methyl
  misc_feature (3)..(3): 2'-O-methyl
  misc_feature (4)..(5): 2'-deoxy-2'-Fluoro
  misc_feature (6)..(7): 2'-O-methyl
  misc_feature (8)..(8): 2'-deoxy-2'-Fluoro
  misc_feature (9)..(9): 2'-O-methyl
  misc_feature (10)..(10): 2'-deoxy-2'-Fluoro
  misc_feature (11)..(14): 2'-O-methyl
  misc_feature (15)..(15): 2'-deoxy-2'-Fluoro
  misc_feature (16)..(16): 2'-O-methyl
  misc_feature (17)..(17): 2'-deoxy-2'-Fluoro
  misc_feature (18)..(19): 2'-O-methyl
acauugguguggagugugatt

SEQ ID NO: 2307 - DNA, 21 bp, Artificial Sequence
  Synthetic
  misc_feature (4)..(7): 2'-deoxy-2'-Fluoro
  misc_feature (8)..(12): 2'-O-methyl
  misc_feature (13)..(13): 2'-deoxy-2'-Fluoro
  misc_feature (14)..(14): 2'-O-methyl
  misc_feature (15)..(16): 2'-deoxy-2'-Fluoro
  misc_feature (17)..(18): 2'-O-methyl
  misc_feature (19)..(19): 2'-deoxy-2'-Fluoro
ccucucuggagauguugactt

SEQ ID NO: 2308 - DNA, 21 bp, Artificial Sequence
  Synthetic
  misc_feature (4)..(8): 2'-deoxy-2'-Fluoro
  misc_feature (9)..(13): 2'-O-methyl
  misc_feature (14)..(14): 2'-deoxy-2'-Fluoro
  misc_feature (15)..(15): 2'-O-methyl
  misc_feature (16)..(17): 2'-deoxy-2'-Fluoro
  misc_feature (18)..(19): 2'-O-methyl
uccucucuggagauguugatt

SEQ ID NO: 2309 - DNA, 21 bp, Artificial Sequence
  Synthetic
  misc_feature (3)..(3): 2'-O-methyl
  misc_feature (4)..(11): 2'-deoxy-2'-Fluoro
  misc_feature (12)..(16): 2'-O-methyl
  misc_feature (17)..(17): 2'-deoxy-2'-Fluoro
  misc_feature (18)..(18): 2'-O-methyl
  misc_feature (19)..(19): 2'-deoxy-2'-Fluoro
uuguccucucuggagaugutt

SEQ ID NO: 2310 - DNA, 21 bp, Artificial Sequence
  Synthetic
  misc_feature (1)..(1): 2'-O-methyl
  misc_feature (4)..(4): 2'-O-methyl
  misc_feature (5)..(12): 2'-deoxy-2'-Fluoro
  misc_feature (13)..(17): 2'-O-methyl
  misc_feature (18)..(18): 2'-deoxy-2'-Fluoro
  misc_feature (19)..(19): 2'-O-methyl
guuguccucucuggagaugtt

SEQ ID NO: 2311 - DNA, 21 bp, Artificial Sequence
  Synthetic
  misc_feature (1)..(1): 2'-O-methyl
  misc_feature (3)..(3): 2'-O-methyl
  misc_feature (4)..(4): 2'-deoxy-2'-Fluoro
  misc_feature (5)..(6): 2'-O-methyl
  misc_feature (7)..(7): 2'-deoxy-2'-Fluoro
  misc_feature (8)..(8): 2'-O-methyl
  misc_feature (9)..(10): 2'-deoxy-2'-Fluoro
  misc_feature (11)..(14): 2'-O-methyl
  misc_feature (15)..(18): 2'-deoxy-2'-Fluoro
  misc_feature (19)..(19): 2'-O-methyl
acgugaugcugggacuccatt

SEQ ID NO: 2312 - DNA, 21 bp, Artificial Sequence
  Synthetic
  misc_feature (2)..(4): 2'-O-methyl
  misc_feature (5)..(6): 2'-deoxy-2'-Fluoro
  misc_feature (7)..(7): 2'-O-methyl
  misc_feature (8)..(8): 2'-deoxy-2'-Fluoro
  misc_feature (9)..(9): 2'-O-methyl
  misc_feature (10)..(11): 2'-deoxy-2'-Fluoro
  misc_feature (12)..(12): 2'-O-methyl
  misc_feature (13)..(13): 2'-deoxy-2'-Fluoro
  misc_feature (14)..(14): 2'-O-methyl
  misc_feature (15)..(15): 2'-deoxy-2'-Fluoro
  misc_feature (16)..(17): 2'-O-methyl
  misc_feature (18)..(18): 2'-deoxy-2'-Fluoro
  misc_feature (19)..(19): 2'-O-methyl
uggguuguaccacgugaugtt

SEQ ID NO: 2313 - DNA, 21 bp, Artificial Sequence
  Synthetic
  misc_feature (1)..(2): 2'-O-methyl
  misc_feature (4)..(5): 2'-deoxy-2'-Fluoro
  misc_feature (6)..(7): 2'-O-methyl
  misc_feature (8)..(11): 2'-deoxy-2'-Fluoro
  misc_feature (12)..(12): 2'-O-methyl
  misc_feature (13)..(14): 2'-deoxy-2'-Fluoro
  misc_feature (15)..(15): 2'-O-methyl
  misc_feature (16)..(16): 2'-deoxy-2'-Fluoro
  misc_feature (17)..(17): 2'-O-methyl
  misc_feature (18)..(19): 2'-deoxy-2'-Fluoro
aaucuggucccaccauauctt

SEQ ID NO: 2314 - DNA, 21 bp, Artificial Sequence
  Synthetic
  misc_feature (1)..(3): 2'-O-methyl
  misc_feature (4)..(4): 2'-deoxy-2'-Fluoro
  misc_feature (5)..(5): 2'-O-methyl
  misc_feature (6)..(11): 2'-deoxy-2'-Fluoro
  misc_feature (12)..(13): 2'-O-methyl
  misc_feature (14)..(15): 2'-deoxy-2'-Fluoro
  misc_feature (16)..(19): 2'-O-methyl
gaacguucucuggccagagtt

SEQ ID NO: 2315 - DNA, 21 bp, Artificial Sequence
  Synthetic
  misc_feature (2)..(4): 2'-O-methyl
  misc_feature (5)..(5): 2'-deoxy-2'-Fluoro
  misc_feature (6)..(6): 2'-O-methyl
  misc_feature (7)..(12): 2'-deoxy-2'-Fluoro
  misc_feature (13)..(14): 2'-O-methyl
  misc_feature (15)..(16): 2'-deoxy-2'-Fluoro
  misc_feature (17)..(19): 2'-O-methyl
ugaacguucucuggccagatt

SEQ ID NO: 2316 - DNA, 21 bp, Artificial Sequence
  Synthetic
  misc_feature (4)..(7): 2'-deoxy-2'-Fluoro
  misc_feature (8)..(8): 2'-O-methyl
  misc_feature (9)..(9): 2'-deoxy-2'-Fluoro
  misc_feature (10)..(10): 2'-O-methyl
  misc_feature (11)..(14): 2'-deoxy-2'-Fluoro
  misc_feature (15)..(15): 2'-O-methyl
  misc_feature (16)..(16): 2'-deoxy-2'-Fluoro
  misc_feature (17)..(17): 2'-O-methyl
  misc_feature (18)..(19): 2'-deoxy-2'-Fluoro
cuccuccacauucuguacutt

SEQ ID NO: 2317 - DNA, 21 bp, Artificial Sequence
  Synthetic
  misc_feature (4)..(12): 2'-deoxy-2'-Fluoro
  misc_feature (13)..(13): 2'-O-methyl
  misc_feature (14)..(14): 2'-deoxy-2'-Fluoro
  misc_feature (15)..(15): 2'-O-methyl
  misc_feature (16)..(19): 2'-deoxy-2'-Fluoro
ucuuccuccuccacauucutt

SEQ ID NO: 2318 - DNA, 21 bp, Artificial Sequence
  Synthetic
  misc_feature (4)..(5): 2'-deoxy-2'-Fluoro
  misc_feature (6)..(8): 2'-O-methyl
  misc_feature (9)..(9): 2'-deoxy-2'-Fluoro
  misc_feature (10)..(11): 2'-O-methyl
  misc_feature (12)..(12): 2'-deoxy-2'-Fluoro
  misc_feature (13)..(13): 2'-O-methyl
  misc_feature (14)..(14): 2'-deoxy-2'-Fluoro
  misc_feature (15)..(15): 2'-O-methyl
  misc_feature (16)..(18): 2'-deoxy-2'-Fluoro
  misc_feature (19)..(19): 2'-O-methyl
uucucaggugacaugcucatt

SEQ ID NO: 2319 - DNA, 21 bp, Artificial Sequence
  Synthetic
  misc_feature (4)..(5): 2'-deoxy-2'-Fluoro
  misc_feature (6)..(6): 2'-O-methyl
  misc_feature (7)..(11): 2'-deoxy-2'-Fluoro
  misc_feature (12)..(13): 2'-O-methyl
  misc_feature (14)..(18): 2'-deoxy-2'-Fluoro
  misc_feature (19)..(19): 2'-O-methyl
ccuccauucucagcccccatt

SEQ ID NO: 2320 - DNA, 21 bp, Artificial Sequence
  Synthetic
  misc_feature (1)..(3): 2'-O-methyl
  misc_feature (4)..(7): 2'-deoxy-2'-Fluoro
  misc_feature (8)..(9): 2'-O-methyl
  misc_feature (10)..(10): 2'-deoxy-2'-Fluoro
  misc_feature (11)..(13): 2'-O-methyl
  misc_feature (14)..(14): 2'-deoxy-2'-Fluoro
  misc_feature (15)..(18): 2'-O-methyl
  misc_feature (19)..(19): 2'-deoxy-2'-Fluoro
aaacuccgguaggcaggautt

SEQ ID NO: 2321 - DNA, 21 bp, Artificial Sequence
  Synthetic
  misc_feature (1)..(4): 2'-O-methyl
  misc_feature (5)..(8): 2'-deoxy-2'-Fluoro
  misc_feature (9)..(10): 2'-O-methyl
  misc_feature (11)..(11): 2'-deoxy-2'-Fluoro
  misc_feature (12)..(14): 2'-O-methyl
  misc_feature (15)..(15): 2'-deoxy-2'-Fluoro
  misc_feature (16)..(19): 2'-O-methyl
aaaacuccgguaggcaggatt

SEQ ID NO: 2322 - DNA, 21 bp, Artificial Sequence
  Synthetic
  misc_feature (2)..(5): 2'-O-methyl
  misc_feature (6)..(9): 2'-deoxy-2'-Fluoro
  misc_feature (10)..(11): 2'-O-methyl
  misc_feature (12)..(12): 2'-deoxy-2'-Fluoro
  misc_feature (13)..(15): 2'-O-methyl
  misc_feature (16)..(16): 2'-deoxy-2'-Fluoro
  misc_feature (17)..(19): 2'-O-methyl
uaaaacuccgguaggcaggtt

SEQ ID NO: 2323 - DNA, 21 bp, Artificial Sequence
  Synthetic
  misc_feature (3)..(6): 2'-O-methyl
  misc_feature (7)..(10): 2'-deoxy-2'-Fluoro
  misc_feature (11)..(12): 2'-O-methyl
  misc_feature (13)..(13): 2'-deoxy-2'-Fluoro
  misc_feature (14)..(16): 2'-O-methyl
  misc_feature (17)..(17): 2'-deoxy-2'-Fluoro
  misc_feature (18)..(19): 2'-O-methyl
cuaaaacuccgguaggcagtt

SEQ ID NO: 2324 - DNA, 21 bp, Artificial Sequence
  Synthetic
  misc_feature (1)..(1): 2'-O-methyl
  misc_feature (4)..(7): 2'-O-methyl
  misc_feature (8)..(11): 2'-deoxy-2'-Fluoro
  misc_feature (12)..(13): 2'-O-methyl
  misc_feature (14)..(14): 2'-deoxy-2'-Fluoro
  misc_feature (15)..(17): 2'-O-methyl
  misc_feature (18)..(18): 2'-deoxy-2'-Fluoro
  misc_feature (19)..(19): 2'-O-methyl
acuaaaacuccgguaggcatt

SEQ ID NO: 2325 - DNA, 21 bp, Artificial Sequence
  Synthetic
  misc_feature (3)..(3): 2'-O-methyl
  misc_feature (4)..(4): 2'-deoxy-2'-Fluoro
  misc_feature (5)..(5): 2'-O-methyl
  misc_feature (6)..(6): 2'-deoxy-2'-Fluoro
  misc_feature (7)..(12): 2'-O-methyl
  misc_feature (13)..(15): 2'-deoxy-2'-Fluoro
  misc_feature (16)..(16): 2'-O-methyl
  misc_feature (17)..(19): 2'-deoxy-2'-Fluoro
ucaugugaaggaucugcuctt

SEQ ID NO: 2326 - DNA, 21 bp, Artificial Sequence
  Synthetic
  misc_feature (1)..(1): 2'-O-methyl
  misc_feature (3)..(6): 2'-O-methyl
  misc_feature (7)..(7): 2'-deoxy-2'-Fluoro
  misc_feature (8)..(8): 2'-O-methyl
  misc_feature (9)..(11): 2'-deoxy-2'-Fluoro
  misc_feature (12)..(12): 2'-O-methyl
  misc_feature (13)..(13): 2'-deoxy-2'-Fluoro
  misc_feature (14)..(14): 2'-O-methyl
  misc_feature (15)..(15): 2'-deoxy-2'-Fluoro
  misc_feature (16)..(19): 2'-O-methyl
gcaggacacucaugugaagtt

SEQ ID NO: 2327 - DNA, 21 bp, Artificial Sequence
  Synthetic
  misc_feature (3)..(3): 2'-O-methyl
  misc_feature (4)..(5): 2'-deoxy-2'-Fluoro
  misc_feature (6)..(6): 2'-O-methyl
  misc_feature (7)..(9): 2'-deoxy-2'-Fluoro
  misc_feature (10)..(10): 2'-O-methyl
  misc_feature (11)..(11): 2'-deoxy-2'-Fluoro
  misc_feature (12)..(12): 2'-O-methyl
  misc_feature (13)..(13): 2'-deoxy-2'-Fluoro
  misc_feature (14)..(16): 2'-O-methyl
  misc_feature (17)..(19): 2'-deoxy-2'-Fluoro
ucacugccugcacaaacuctt

SEQ ID NO: 2328 - DNA, 21 bp, Artificial Sequence
  Synthetic
  misc_feature (1)..(1): 2'-O-methyl
  misc_feature (3)..(8): 2'-O-methyl
  misc_feature (9)..(9): 2'-deoxy-2'-Fluoro
  misc_feature (10)..(12): 2'-O-methyl
  misc_feature (13)..(13): 2'-deoxy-2'-Fluoro
  misc_feature (14)..(14): 2'-O-methyl
  misc_feature (15)..(15): 2'-deoxy-2'-Fluoro
  misc_feature (16)..(16): 2'-O-methyl
  misc_feature (17)..(17): 2'-deoxy-2'-Fluoro
  misc_feature (18)..(19): 2'-O-methyl
gugagggacgaguacacaatt

SEQ ID NO: 2329 - DNA, 21 bp, Artificial Sequence
  Synthetic
  misc_feature (1)..(7): 2'-O-methyl
  misc_feature (8)..(8): 2'-deoxy-2'-Fluoro
  misc_feature (9)..(12): 2'-O-methyl
  misc_feature (13)..(13): 2'-deoxy-2'-Fluoro
  misc_feature (14)..(16): 2'-O-methyl
  misc_feature (17)..(19): 2'-deoxy-2'-Fluoro
gagaaagcaaaaugagucctt

SEQ ID NO: 2330 - DNA, 21 bp, Artificial Sequence
  Synthetic
  misc_feature (1)..(3): 2'-O-methyl
  misc_feature (4)..(4): 2'-deoxy-2'-Fluoro
  misc_feature (5)..(7): 2'-O-methyl
  misc_feature (8)..(8): 2'-deoxy-2'-Fluoro
  misc_feature (9)..(12): 2'-O-methyl
  misc_feature (13)..(13): 2'-deoxy-2'-Fluoro
  misc_feature (14)..(15): 2'-O-methyl
  misc_feature (16)..(16): 2'-deoxy-2'-Fluoro
  misc_feature (17)..(19): 2'-O-methyl
gagcagguagggcaacaagtt

SEQ ID NO: 2331 - DNA, 21 bp, Artificial Sequence
  Synthetic
  misc_feature (1)..(3): 2'-O-methyl
  misc_feature (4)..(5): 2'-deoxy-2'-Fluoro
  misc_feature (6)..(7): 2'-O-methyl
  misc_feature (8)..(12): 2'-deoxy-2'-Fluoro
  misc_feature (13)..(14): 2'-O-methyl
  misc_feature (15)..(16): 2'-deoxy-2'-Fluoro
  misc_feature (17)..(19): 2'-O-methyl
ggaccagcuuccagcuggatt

SEQ ID NO: 2332 - DNA, 21 bp, Artificial Sequence
  Synthetic
  misc_feature (2)..(3): 2'-O-methyl
  misc_feature (4)..(7): 2'-deoxy-2'-Fluoro
  misc_feature (8)..(10): 2'-O-methyl
  misc_feature (11)..(11): 2'-deoxy-2'-Fluoro
  misc_feature (12)..(13): 2'-O-methyl
  misc_feature (14)..(15): 2'-deoxy-2'-Fluoro
  misc_feature (16)..(18): 2'-O-methyl
  misc_feature (19)..(19): 2'-deoxy-2'-Fluoro
ugacuuugggcaaucaagutt

SEQ ID NO: 2333 - DNA, 21 bp, Artificial Sequence
  Synthetic
  misc_feature (1)..(1): 2'-O-methyl
  misc_feature (3)..(4): 2'-O-methyl
  misc_feature (5)..(8): 2'-deoxy-2'-Fluoro
  misc_feature (9)..(11): 2'-O-methyl
  misc_feature (12)..(12): 2'-deoxy-2'-Fluoro
  misc_feature (13)..(14): 2'-O-methyl
  misc_feature (15)..(16): 2'-deoxy-2'-Fluoro
  misc_feature (17)..(19): 2'-O-methyl
gugacuuugggcaaucaagtt

SEQ ID NO: 2334 - DNA, 21 bp, Artificial Sequence
  Synthetic
  misc_feature (1)..(2): 2'-O-methyl
  misc_feature (4)..(7): 2'-deoxy-2'-Fluoro
  misc_feature (8)..(9): 2'-O-methyl
  misc_feature (10)..(11): 2'-deoxy-2'-Fluoro
  misc_feature (12)..(12): 2'-O-methyl
  misc_feature (13)..(13): 2'-deoxy-2'-Fluoro
  misc_feature (14)..(14): 2'-O-methyl
  misc_feature (15)..(15): 2'-deoxy-2'-Fluoro
  misc_feature (16)..(16): 2'-O-methyl
  misc_feature (17)..(17): 2'-deoxy-2'-Fluoro
  misc_feature (18)..(19): 2'-O-methyl
ggcuucuggccacauguggtt

SEQ ID NO: 2335 - DNA, 21 bp, Artificial Sequence
  Synthetic
  misc_feature (4)..(4): 2'-O-methyl
  misc_feature (5)..(7): 2'-deoxy-2'-Fluoro
  misc_feature (8)..(8): 2'-O-methyl
  misc_feature (9)..(10): 2'-deoxy-2'-Fluoro
  misc_feature (11)..(14): 2'-O-methyl
  misc_feature (15)..(18): 2'-deoxy-2'-Fluoro
  misc_feature (19)..(19): 2'-O-methyl
uuuguuuacugggaucccatt

SEQ ID NO: 2336 - DNA, 21 bp, Artificial Sequence
  Synthetic
  misc_feature (1)..(1): 2'-O-methyl
  misc_feature (3)..(4): 2'-O-methyl
  misc_feature (5)..(6): 2'-deoxy-2'-Fluoro
  misc_feature (7)..(9): 2'-O-methyl
  misc_feature (10)..(11): 2'-deoxy-2'-Fluoro
  misc_feature (12)..(12): 2'-O-methyl
  misc_feature (13)..(13): 2'-deoxy-2'-Fluoro
  misc_feature (14)..(15): 2'-O-methyl
  misc_feature (16)..(18): 2'-deoxy-2'-Fluoro
  misc_feature (19)..(19): 2'-O-methyl
gcagucagacugcagucugtt

SEQ ID NO: 2337 - DNA, 21 bp, Artificial Sequence
  Synthetic
  misc_feature (2)..(2): 2'-O-methyl
  misc_feature (4)..(5): 2'-O-methyl
  misc_feature (6)..(7): 2'-deoxy-2'-Fluoro
  misc_feature (8)..(10): 2'-O-methyl
  misc_feature (11)..(12): 2'-deoxy-2'-Fluoro
  misc_feature (13)..(13): 2'-O-methyl
  misc_feature (14)..(14): 2'-deoxy-2'-Fluoro
  misc_feature (15)..(16): 2'-O-methyl
  misc_feature (17)..(19): 2'-deoxy-2'-Fluoro
ugcagucagacugcagucutt

SEQ ID NO: 2338 - DNA, 21 bp, Artificial Sequence
  Synthetic
  misc_feature (1)..(1): 2'-O-methyl
  misc_feature (3)..(3): 2'-O-methyl
  misc_feature (4)..(4): 2'-deoxy-2'-Fluoro
  misc_feature (5)..(6): 2'-O-methyl
  misc_feature (7)..(8): 2'-deoxy-2'-Fluoro
  misc_feature (9)..(11): 2'-O-methyl
  misc_feature (12)..(13): 2'-deoxy-2'-Fluoro
  misc_feature (14)..(14): 2'-O-methyl
  misc_feature (15)..(15): 2'-deoxy-2'-Fluoro
  misc_feature (16)..(17): 2'-O-methyl
  misc_feature (18)..(19): 2'-deoxy-2'-Fluoro
augcagucagacugcaguctt

SEQ ID NO: 2339 - DNA, 21 bp, Artificial Sequence
  Synthetic
acuugauugcccaaagucatt

SEQ ID NO: 2340 - DNA, 21 bp, Artificial Sequence
  Synthetic
ugacuuugggcaaucaagutt

SEQ ID NO: 2341 - DNA, 21 bp, Artificial Sequence
  Synthetic
  misc_feature (1)..(19): RNA
  misc_feature (1)..(1): 5'-3 attached terminal deoxyabasic moeity, inverted abasic, inverted nucleotide or other terminal cap that is optionally present
  misc_feature (21)..(21): 3'-3 attached terminal deoxyabasic moeity, inverted abasic, inverted nucleotide or other terminal cap that is optionally present
  misc_feature (20)..(21): n stands for any nucleotide
nnnnnnnnnnnnnnnnnnnnn

SEQ ID NO: 2342 - DNA, 21 bp, Artificial Sequence
  Synthetic
  misc_feature (1)..(19): RNA
  misc_feature (20)..(20): Phosphorothioate or Phosphorodithioate 3'-Internucleotide Linkage (optionally present)
  misc_feature (20)..(21): n stands for any nucleotide
  misc_feature (21)..(21): 3'-3 attached terminal glyceryl moeity or inverted deoxyabasic (optionally present)
nnnnnnnnnnnnnnnnnnnnn

SEQ ID NO: 2343 - DNA, 21 bp, Artificial Sequence
  Synthetic
  misc_feature (1)..(19): RNA
  misc_feature (1)..(19): n stands for any nucleotide wherein any pyrimidine nucleotide present is 2'-Fluoro or 2'-OCF3 and any purine nucleotide present is 2'-O-methyl
  misc_feature (20)..(20): Phosphorothioate or Phosphorodithioate 3'-Internucleotide Linkage (optionally present)
  misc_feature (20)..(21): n stands for any nucleotide
nnnnnnnnnnnnnnnnnnnnn

SEQ ID NO: 2344 - DNA, 21 bp, Artificial Sequence
  Synthetic
  misc_feature (1)..(19): RNA
  misc_feature (1)..(19): n stands for any nucleotide wherein any pyrimidine nucleotide present is 2'-Fluoro or 2'-OCF3 and any purine nucleotide present is 2'-O-methyl
  misc_feature (20)..(20): Phosphorothioate or Phosphorodithioate 3'-Internucleotide Linkage (optionally present)
  misc_feature (20)..(21): n stands for any nucleotide
  misc_feature (21)..(21): 3'-3 attached terminal glyceryl moeity or inverted deoxyabasic (optionally present)
nnnnnnnnnnnnnnnnnnnnn

SEQ ID NO: 2345 - DNA, 21 bp, Artificial Sequence
  Synthetic
  misc_feature (1)..(19): RNA
  misc_feature (1)..(19): n stands for any nucleotide wherein any pyrimidine nucleotide present is 2'-Fluoro or 2'OCF3
  misc_feature (20)..(21): n stands for any nucleotide
  misc_feature (1)..(1): 5'-3 attached terminal deoxyabasic moeity, inverted abasic, inverted nucleotide or other terminal cap that is optionally present
  misc_feature (21)..(21): 3'-3 attached terminal deoxyabasic moeity, inverted abasic, inverted nucleotide or other terminal cap that is optionally present
nnnnnnnnnnnnnnnnnnnnn

SEQ ID NO: 2346 - DNA, 21 bp, Artificial Sequence
  Synthetic
  misc_feature (1)..(19): RNA
  misc_feature (1)..(19): n stands for any nucleotide wherein any pyrimidine nucleotide present is 2'-Fluoro or 2'-OCF3
  misc_feature (20)..(20): Phosphorothioate or Phosphorodithioate 3'-Internucleotide Linkage (optionally present)
  misc_feature (20)..(21): n stands for any nucleotide
  misc_feature (21)..(21): 3'-3 attached terminal glyceryl moeity or inverted deoxyabasic (optionally present)
nnnnnnnnnnnnnnnnnnnnn

SEQ ID NO: 2347 - DNA, 21 bp, Artificial Sequence
  Synthetic
  misc_feature (1)..(19): RNA
  misc_feature (1)..(19): n stands for any nucleotide wherein any pyrimidine nucleotide present is 2'-Fluoro or 2'-OCF3 and any purine nucleotide present is 2'-Deoxy
  misc_feature (20)..(21): n stands for any nucleotide
  misc_feature (1)..(1): 5'-3 attached terminal deoxyabasic moeity, inverted abasic, inverted nucleotide or other terminal cap that is optionally present
  misc_feature (21)..(21): 3'-3 attached terminal deoxyabasic moeity, inverted abasic, inverted nucleotide or other terminal cap that is optionally present
nnnnnnnnnnnnnnnnnnnnn

SEQ ID NO: 2348 - DNA, 21 bp, Artificial Sequence
  Synthetic
  misc_feature (1)..(19): RNA
  misc_feature (1)..(19): n stands for any nucleotide wherein any pyrimidine nucleotide present is 2'-Fluoro or 2'-OCF3
  misc_feature (20)..(21): n stands for any nucleotide
  misc_feature (1)..(1): 5'-3 attached terminal deoxyabasic moeity, inverted abasic, inverted nucleotide or other terminal cap that is optionally present
  misc_feature (21)..(21): 3'-3 attached terminal deoxyabasic moeity, inverted abasic, inverted nucleotide or other terminal cap that is optionally present
nnnnnnnnnnnnnnnnnnnnn

SEQ ID NO: 2349 - DNA, 21 bp, Artificial Sequence
  Synthetic
  misc_feature (1)..(19): RNA
  misc_feature (1)..(19): n stands for any nucleotide wherein any pyrimidine nucleotide present is 2'-Fluoro or 2'-OCF3 and any purine nucleotide present is 2'-Deoxy
  misc_feature (20)..(20): Phosphorothioate or Phosphorodithioate 3'-Internucleotide Linkage (optionally present)
  misc_feature (20)..(21): n stands for any nucleotide
  misc_feature (21)..(21): 3'-3 attached terminal glyceryl moeity or inverted deoxyabasic (optionally present)
nnnnnnnnnnnnnnnnnnnnn

SEQ ID NO: 2350 - DNA, 21 bp, Artificial Sequence
  Synthetic
  misc_feature (1)..(19): RNA
  misc_feature (1)..(1): 5'-3 attached terminal deoxyabasic moeity, inverted abasic, inverted nucleotide or other terminal cap that is optionally present
  misc_feature (21)..(21): 3'-3 attached terminal deoxyabasic moeity, inverted abasic, inverted nucleotide or other terminal cap that is optionally present
gggcgcugcugcucugcgcnn

SEQ ID NO: 2351 - DNA, 21 bp, Artificial Sequence
  Synthetic
  misc_feature (1)..(19): RNA
  misc_feature (20)..(20): Phosphorothioate or Phosphorodithioate 3'-Internucleotide Linkage (optionally present)
  misc_feature (21)..(21): 3'-3 attached terminal glyceryl moeity or inverted deoxyabasic (optionally present)
gcgcagagcagcagcgcccnn

SEQ ID NO: 2352 - DNA, 21 bp, Artificial Sequence
  Synthetic
  misc_feature (1)..(3): 2'-O-Methyl
  misc_feature (5)..(5): 2'-O-Methyl
  misc_feature (8)..(8): 2'-O-Methyl
  misc_feature (11)..(11): 2'-O-Methyl
  misc_feature (16)..(16): 2'-O-Methyl
  misc_feature (18)..(18): 2'-O-Methyl
  misc_feature (4)..(4): 2'-deoxy-2'Fluoro or 2'-OCF3
  misc_feature (6)..(7): 2'-deoxy-2'Fluoro or 2'-OCF3
  misc_feature (9)..(10): 2'-deoxy-2'Fluoro or 2'-OCF3
  misc_feature (12)..(15): 2'-deoxy-2'Fluoro or 2'-OCF3
  misc_feature (17)..(17): 2'-deoxy-2'Fluoro or 2'-OCF3
  misc_feature (19)..(19): 2'-deoxy-2'Fluoro or 2'-OCF3
  misc_feature (20)..(20): Phosphorothioate or Phosphorodithioate 3'-Internucleotide Linkage (optionally present)
gggcgcugcugcucugcgcnn

SEQ ID NO: 2353 - DNA, 21 bp, Artificial Sequence
  Synthetic
  misc_feature (1)..(1): 2'-O-Methyl
  misc_feature (3)..(3): 2'-O-Methyl
  misc_feature (5)..(8): 2'-O-Methyl
  misc_feature (10)..(11): 2'-O-Methyl
  misc_feature (13)..(14): 2'-O-Methyl
  misc_feature (16)..(16): 2'-O-Methyl
  misc_feature (2)..(2): 2'-deoxy-2'Fluoro or 2'-OCF3
  misc_feature (4)..(4): 2'-deoxy-2'Fluoro or 2'-OCF3
  misc_feature (9)..(9): 2'-deoxy-2'Fluoro or 2'-OCF3
  misc_feature (12)..(12): 2'-deoxy-2'Fluoro or 2'-OCF3
  misc_feature (15)..(15): 2'-deoxy-2'Fluoro or 2'-OCF3
  misc_feature (17)..(19): 2'-deoxy-2'Fluoro or 2'-OCF3
  misc_feature (20)..(20): Phosphorothioate or Phosphorodithioate 3'-Internucleotide Linkage (optionally present)
  misc_feature (21)..(21): 3'-3 attached terminal glyceryl moeity or inverted deoxyabasic (optionally present)
gcgcagagcagcagcgcccnn

SEQ ID NO: 2354 - DNA, 21 bp, Artificial Sequence
  Synthetic
  misc_feature (1)..(3): RNA
  misc_feature (5)..(5): RNA
  misc_feature (8)..(8): RNA
  misc_feature (11)..(11): RNA
  misc_feature (16)..(18): RNA
  misc_feature (1)..(1): 5'-3 attached terminal deoxyabasic moeity, inverted abasic, inverted nucleotide or other terminal cap that is optionally present
  misc_feature (21)..(21): 3'-3 attached terminal deoxyabasic moeity, inverted abasic, inverted nucleotide or other terminal cap that is optionally present
  misc_feature (4)..(4): 2'-deoxy-2'Fluoro or 2'-OCF3
  misc_feature (6)..(7): 2'-deoxy-2'Fluoro or 2'-OCF3
  misc_feature (9)..(10): 2'-deoxy-2'Fluoro or 2'-OCF3
  misc_feature (12)..(15): 2'-deoxy-2'Fluoro or 2'-OCF3
  misc_feature (17)..(17): 2'-deoxy-2'Fluoro or 2'-OCF3
  misc_feature (19)..(19): 2'-deoxy-2'Fluoro or 2'-OCF3
gggcgcugcugcucugcgcnn

SEQ ID NO: 2355 - DNA, 21 bp, Artificial Sequence
  Synthetic
  misc_feature (1)..(1): RNA
  misc_feature (3)..(3): RNA
  misc_feature (5)..(8): RNA
  misc_feature (10)..(11): RNA
  misc_feature (13)..(14): RNA
  misc_feature (16)..(16): RNA
  misc_feature (2)..(2): 2'-deoxy-2'Fluoro or 2'-OCF3
  misc_feature (4)..(4): 2'-deoxy-2'Fluoro or 2'-OCF3
  misc_feature (9)..(9): 2'-deoxy-2'Fluoro or 2'-OCF3
  misc_feature (12)..(12): 2'-deoxy-2'Fluoro or 2'-OCF3
  misc_feature (15)..(15): 2'-deoxy-2'Fluoro or 2'-OCF3
  misc_feature (17)..(19): 2'-deoxy-2'Fluoro or 2'-OCF3
  misc_feature (20)..(20): Phosphorothioate or Phosphorodithioate 3'-Internucleotide Linkage (optionally present)
  misc_feature (21)..(21): 3'-3 attached terminal glyceryl moeity or inverted deoxyabasic (optionally present)
gcgcagagcagcagcgcccnn

SEQ ID NO: 2356 - DNA, 21 bp, Artificial Sequence
  Description of Artificial Sequence:  Synthetic
  misc_feature (1)..(19): RNA
  misc_feature (1)..(1): 5'-3 attached terminal deoxyabasic moeity, inverted abasic, inverted nucleotide or other terminal cap that is optionally present
  misc_feature (21)..(21): 3'-3 attached terminal deoxyabasic moeity, inverted abasic, inverted nucleotide or other terminal cap that is optionally present
  misc_feature (4)..(4): 2'-deoxy-2'Fluoro or 2'-OCF3
  misc_feature (6)..(7): 2'-deoxy-2'Fluoro or 2'-OCF3
  misc_feature (9)..(10): 2'-deoxy-2'Fluoro or 2'-OCF3
  misc_feature (12)..(15): 2'-deoxy-2'Fluoro or 2'-OCF3
  misc_feature (17)..(17): 2'-deoxy-2'Fluoro or 2'-OCF3
  misc_feature (19)..(19): 2'-deoxy-2'Fluoro or 2'-OCF3
  misc_feature (1)..(3): 2'-deoxy
  misc_feature (5)..(5): 2'-deoxy
  misc_feature (8)..(8): 2'-deoxy
  misc_feature (11)..(11): 2'-deoxy
  misc_feature (16)..(16): 2'-deoxy
  misc_feature (18)..(18): 2'-deoxy
gggcgcugcugcucugcgcnn

SEQ ID NO: 2357 - DNA, 21 bp, Artificial Sequence
  Synthetic
  misc_feature (1)..(3): RNA
  misc_feature (5)..(5): RNA
  misc_feature (8)..(8): RNA
  misc_feature (11)..(11): RNA
  misc_feature (16)..(18): RNA
  misc_feature (1)..(1): 5'-3 attached terminal deoxyabasic moeity, inverted abasic, inverted nucleotide or other terminal cap that is optionally present
  misc_feature (21)..(21): 3'-3 attached terminal deoxyabasic moeity, inverted abasic, inverted nucleotide or other terminal cap that is optionally present
  misc_feature (4)..(4): 2'-deoxy-2'Fluoro or 2'-OCF3
  misc_feature (6)..(7): 2'-deoxy-2'Fluoro or 2'-OCF3
  misc_feature (9)..(10): 2'-deoxy-2'Fluoro or 2'-OCF3
  misc_feature (12)..(15): 2'-deoxy-2'Fluoro or 2'-OCF3
  misc_feature (17)..(17): 2'-deoxy-2'Fluoro or 2'-OCF3
  misc_feature (19)..(19): 2'-deoxy-2'Fluoro or 2'-OCF3
gggcgcugcugcucugcgcnn

SEQ ID NO: 2358 - DNA, 21 bp, Artificial Sequence
  Synthetic
  misc_feature (2)..(2): 2'-deoxy-2'Fluoro or 2'-OCF3
  misc_feature (4)..(4): 2'-deoxy-2'Fluoro or 2'-OCF3
  misc_feature (9)..(9): 2'-deoxy-2'Fluoro or 2'-OCF3
  misc_feature (12)..(12): 2'-deoxy-2'Fluoro or 2'-OCF3
  misc_feature (15)..(15): 2'-deoxy-2'Fluoro or 2'-OCF3
  misc_feature (17)..(19): 2'-deoxy-2'Fluoro or 2'-OCF3
  misc_feature (1)..(1): 2'-deoxy
  misc_feature (3)..(3): 2'-deoxy
  misc_feature (5)..(8): 2'-deoxy
  misc_feature (10)..(11): 2'-deoxy
  misc_feature (13)..(14): 2'-deoxy
  misc_feature (16)..(16): 2'-deoxy
  misc_feature (20)..(20): Phosphorothioate or Phosphorodithioate 3'-Internucleotide Linkage (optionally present)
  misc_feature (21)..(21): 3'-3 attached terminal glyceryl moeity or inverted deoxyabasic (optionally present)
gcgcagagcagcagcgcccnn

SEQ ID NO: 2359 - RNA, 14 nt, Artificial Sequence
  Target Sequence/duplex forming oligonucleotide
auauaucuauuucg

SEQ ID NO: 2360 - RNA, 14 nt, Artificial Sequence
  Complementary Sequence/duplex forming oligonucleotide
cgaaauagauauau

SEQ ID NO: 2361 - RNA, 22 nt, Artificial Sequence
  Self Complementary duplex construct
cgaaauagauauaucuauuucg

SEQ ID NO: 2362 - DNA, 24 bp, Artificial Sequence
  Duplex forming oligonucleotide
  misc_feature (1)..(22): RNA
cgaaauagauauaucuauuucgnn
